(19) United States
(12) Patent Application Publication
(10) Pub. No.: US 2026/0125687 A1
(43) Pub. Date: May 7, 2026

(54) RNA THERAPEUTICS FOR FIBRODYSPLASIA OSSIFICANS PROGRESSIVA AND USES THEREOF

(71) Applicant: UNIVERSITY OF MASSACHUSETTS, Westborough, MA (US)

(72) Inventors: Jae-Hyuck SHIM, Westborough, MA (US); Julia ALTERMAN, Shrewsbury, MA (US); Yeon-Suk YANG, Westborough, MA (US); David COOPER, Framingham, MA (US); Nozomi YAMADA, Westborough, MA (US); Katherine GROSS, Worcester, MA (US); Jillian CAIAZZI, Durham, NC (US)

(21) Appl. No.: 19/350,915

(22) Filed: Oct. 6, 2025

Related U.S. Application Data
(63) Continuation of application No. PCT/US2024/025492, filed on Apr. 19, 2024.
(60) Provisional application No. 63/497,292, filed on Apr. 20, 2023.

(51) Int. Cl. C12N 15/113; A61P 19/08

(52) U.S. Cl. CPC C12N 15/1138; A61P 19/08; C12N 15/1136; C12N 2310/14; C12N 2310/313; C12N 2310/321; C12N 2310/322; C12N 2310/351; C12N 2320/32

(57) ABSTRACT

Aspects of the disclosure relate to compositions and methods for treating Fibrodysplasia ossificans progressiva (FOP). The disclosure is based, in part, on muscle-targeting, chemically-modified interfering nucleic acids (e.g., siRNAs) that bind to and inhibit an ACVR1^{R206H} allele or an Inhba allele of a subject.

### RELATED APPLICATIONS

[0001] This application is a continuation of International Patent Application No. PCT/US2024/025492, filed Apr. 19, 2024, which claims priority to U.S. Provisional Patent Application Ser. No. 63/497,292, filed Apr. 20, 2023, the entire contents of which are incorporated herein by reference.

### SEQUENCE LISTING

[0002] The instant application contains a Sequence Listing which has been submitted electronically in XML format and is hereby incorporated by reference in its entirety. Said XML file, created on Oct. 6, 2025, is named 769944_UM9-323PCCON_ST26.xml and is 3,016,367 bytes in size.

### BACKGROUND

[0003] Fibrodysplasia ossificans progressiva (FOP) is an ultra-rare genetic disorder characterized by progressive, disabling heterotopic ossification (HO) that forms within skeletal muscle, tendons, ligaments, fascia, and aponeuroses. HO develops during flare-ups that occur spontaneously or are triggered by minor trauma, injury, intramuscular injection, or inflammation. Approximately 97% of FOP patients carry a mutation (c.617G>A; R206H) in the ACVR1 gene.

### SUMMARY

[0004] Aspects of the disclosure relate to compositions and methods for treating Fibrodysplasia ossificans progressiva (FOP). The disclosure is based, in part, on muscle-targeting, chemically-modified interfering nucleic acids (e.g., siRNAs) that bind to and inhibit an ACVR1^{R206H} allele or an Inhba allele of a subject. In some aspects, the disclosure relates to muscle-targeting, chemically-modified bi-specific siRNAs that bind to and inhibit combinations of genes associated with FOP, for example ACVR1^{206H}, Inhba, IL-1β, TNF, and myostatin (Mstn).

[0005] In some aspects, the present disclosure provide an isolated nucleic acid comprising a sense strand and an antisense strand, wherein the antisense strand comprises a sequence that is at least 80% complementary to at least 18 consecutive nucleotides of a ACVR1^{R206H} sequence of SEQ ID NO: 675. In some embodiments, the antisense strand is at least 80% complementary to at least 20 consecutive nucleotide of SEQ ID NO: 675. In some embodiments, antisense strand is at least 80% complementary to the sequence as set forth in any one of SEQ ID NOs: 676-721. In some embodiments, the antisense strand comprises the nucleic acid sequence of any one of SEQ ID NOs: 768-813. 15. In some embodiments, the sense strand comprises the chemical modification pattern set forth in Table 1 or 2. In some embodiments, the antisense strand comprises the chemical modification pattern set forth in Table 1 or 2. In some embodiments, the sense strand comprises the sequence set forth in any one of SEQ ID NOs: 1-16, and 33-62. In some embodiments, the antisense strand comprises the sequence set forth in any one of SEQ ID NOs: 17-32 and 63-92.

[0006] In some aspects, the present disclosure provides an isolated nucleic acid comprising a sense strand and an antisense strand, wherein the antisense strand comprises a sequence that is at least 80% complementary to at least 18 consecutive nucleotides of a INHBA sequence of any one of SEQ ID NOs: 817-912. In some embodiments, the antisense strand is at least 80% complementary to at least 20 consecutive nucleotide of any one of SEQ ID NOs: 817-912. In some embodiments, antisense strand is at least 80% complementary to the sequence as set forth in any one of SEQ ID NOs: 913-1007. In some embodiments, the antisense strand comprises the nucleic acid sequence of any one of SEQ ID NOs: 1008-1103. In some embodiments, the sense strand comprises the nucleic acid sequence of any one of SEQ ID NOs: 1104-1199. In some embodiments, the sense strand comprises the chemical modification pattern set forth in Table 3. In some embodiments, the antisense strand comprises the chemical modification pattern set forth in Table 3. In some embodiments, the sense strand comprises the sequence set forth in any one of SEQ ID NOs: 93-188. In some embodiments, the antisense strand comprises the sequence set forth in any one of SEQ ID NOs: 189-284.

[0007] In some aspects, the present disclosure provides an isolated nucleic acid comprising a sense strand and an antisense strand, wherein the antisense strand comprises a sequence that is at least 80% complementary to at least 18 consecutive nucleotides of a MSTN sequence of any one of SEQ ID NOs: 1376-1472, and 1200-1287. In some embodiments, the antisense strand is at least 80% complementary to at least 20 consecutive nucleotide of any one of SEQ ID NOs: 1376-1472, and 1200-1287. In some embodiments, antisense strand is at least 80% complementary to the sequence as set forth in any one of SEQ ID NOs: 1473-1569, and 1288-1375. In some embodiments, the antisense strand comprises the nucleic acid sequence of any one of SEQ ID NOs: 1570-1657, and 1746-1842. In some embodiments, the sense strand comprises the nucleic acid sequence of any one of SEQ ID NOs: 1658-1745, and 1843-1939. In some embodiments, the sense strand comprises the chemical modification pattern set forth in Table 4 or 5. In some embodiments, the antisense strand comprises the chemical modification pattern set forth in Table 4 or 5. In some embodiments, the sense strand comprises the sequence set forth in any one of SEQ ID NOs: 285-372 and 481-577. In some embodiments, the antisense strand comprises the sequence set forth in any one of SEQ ID NOs: 373-480 and 578-674.

[0008] In some aspects, the disclosure provides an isolated nucleic acid having a length between 10 and 30 nucleotides, comprising a sense strand having the sequence set forth in any one of SEQ ID NOs: 1-16 and 33-62; and an antisense strand having the sequence set forth in any one of SEQ ID NOs: 17-32 and 63-92.

[0009] In some aspects, the disclosure provides an isolated nucleic acid having a length between 10 and 30 nucleotides, comprising a sense strand having the sequence set forth in any one of SEQ ID NOs: 93-188; and an antisense strand having the sequence set forth in any one of SEQ ID NOs: 189-284.

[0010] In some aspects, the disclosure provides an isolated nucleic acid having a length between 10 and 30 nucleotides, comprising a sense strand having the sequence set forth in any one of SEQ ID NOs: 285-372 and 481-577; and an antisense strand having the sequence set forth in any one of SEQ ID NOs: 373-480 and 578-674.

[0011] In some embodiments, a sense strand comprises one or more chemical modifications selected from: one or more ribose modifications, and one or more backbone modifications. In some embodiments, one or more ribose modifications comprise 2′-OMe modifications or 2′-F modifications. In some embodiments, one or more backbone modifications are phosphorothioate (PS) modifications.

[0012] In some embodiments, an antisense strand comprises one or more chemical modifications selected from: one or more ribose modifications, and one or more backbone modifications. In some embodiments, one or more ribose modifications comprise 2′-OMe modifications or 2′-F modifications. In some embodiments, one or more backbone modifications are phosphorothioate (PS) modifications.

[0013] In some embodiments, an isolated nucleic acid further comprises a cholesterol molecule. In some embodiments, an isolated nucleic acid is conjugated to a cholesterol by a TEG linker.

[0014] In some embodiments, an isolated nucleic acid is conjugated to a docosanoic acid (DCA). In some embodiments, DCA is conjugated to an isolated nucleic acid via a cleavable linker.

[0015] In some embodiments, a sense strand of an isolated nucleic acid comprises the chemical modification pattern set forth in Table 1 or 2. In some embodiments, an antisense strand of an isolated nucleic acid comprises the chemical modification pattern set forth in Table 1 or 2.

[0016] In some embodiments, a sense strand of an isolated nucleic acid comprises the chemical modification pattern set forth in Table 3. In some embodiments, an antisense strand of an isolated nucleic acid comprises the chemical modification pattern set forth in Table 3.

[0017] In some embodiments, a sense strand of an isolated nucleic acid comprises the chemical modification pattern set forth in Table 4 or 5. In some embodiments, an antisense strand of an isolated nucleic acid comprises the chemical modification pattern set forth in Table 4 or 5.

[0018] In some aspects, the disclosure provides a bi-specific nucleic acid molecule comprising a first siRNA targeting a first RNA transcript selected from ACVR1R206H, Inhba, IL-1β, TNF, and myostatin (Mstn); linked to a second siRNA targeting a second RNA transcript selected from ACVR1R206H, Inhba, IL-1β, TNF, and myostatin (Mstn), wherein the first RNA transcript and second RNA transcript are not transcribed from the same gene.

[0019] In some embodiments, a first siRNA and second siRNA are linked via a linking molecule.

[0020] In some embodiments, a first siRNA is selected from an siRNA set forth in any one of Tables 1-5.

[0021] In some embodiments, a second siRNA is selected from an siRNA set forth in any one of Tables 1-5.

[0022] In some embodiments, a first siRNA or second siRNA is conjugated to a docosanoic acid (DCA). In some embodiments, a DCA is conjugated to a first siRNA or second siRNA via a cleavable linker.

[0023] In some aspects, the disclosure provides a composition comprising an isolated nucleic acid as described herein, or the bispecific nucleic acid molecule described herein, and a pharmaceutically acceptable excipient.

[0024] In some aspects, the disclosure provides a method for inhibiting Activin A activity or function in a subject in need thereof, the method comprising administering to the subject an isolated nucleic acid or bi-specific nucleic acid molecule as described herein.

[0025] In some aspects, the disclosure provides a method for treating or preventing heterotopic ossification in a subject in need thereof, the method comprising administering to the subject an isolated nucleic acid or bi-specific nucleic acid molecule as described herein.

[0026] In some aspects, the disclosure provides a method for treating or preventing Fibrodysplasia ossificans progressiva (FOP) in a subject in need thereof, the method comprising administering to the subject an isolated nucleic acid or bi-specific nucleic acid molecule as described herein.

[0027] In some embodiments, administration comprises local administration. In some embodiments, administration comprises intramuscular injection.

[0028] In some embodiments, a subject is a human. In some embodiments, a subject comprises one or more mutations in an ACVR1 allele. In some embodiments, one or more mutations comprise an ACVR1R206H mutation.

### BRIEF DESCRIPTION OF DRAWINGS

[0029] FIG. 1 shows a schematic depicting structural features of siRNAs and bi-specific siRNA molecules for use in treatment of FOP.

[0030] FIG. 2 shows representative data for testing of allele-specific ACVR1^{R206H} siRNAs in vitro in mouse cells.

[0031] FIG. 3 shows representative data for testing of allele-specific ACVR1^{R206H} siRNAs in vitro in human FOP patient-derived iPSCs.

[0032] FIG. 4 shows representative data for target gene silencing by SNP6-mismatch mutation siRNAs and SNP8-mismatch mutation siRNAs. Left bars in each group represent ACVR1-WT, and right bar in each group represent ACVR1-R206H.

[0033] FIG. 5 shows representative data for dose-response curves of SNP6-based siRNAs.

[0034] FIG. 6A shows representative data for SNP6-9 (antisense strand sequence set forth in SEQ ID NO: 69) discrimination between wild-type ACVR1 and ACVR1^{R206H} mRNA in human FOP patient-derived iPSCs.

[0035] FIG. 6B shows representative data demonstrating dose-responsive knockdown of human ACVR1^{R206H} protein expression in FOP cells.

[0036] FIG. 7 shows representative data demonstrating reduction of Activin A activity after treatment with SNP6-9 siRNA.

[0037] FIG. 8 shows representative data demonstrating high transfection efficiency of DCA-conjugated SNP6-9 in HO-causing cell types (e.g., immune cells, chondrocytes, myoblasts/myocytes, etc.).

[0038] FIG. 9 shows representative data for screening of mouse Inhba-targeting siRNAs.

[0039] FIG. 10 shows representative data for screening of human Inhba-targeting siRNAs.

[0040] FIG. 11 shows a schematic depicting representative structures of bi-specific siRNAs targeting genes associated with FOP.

[0041] FIG. 12 shows representative data indicating that muscle fibers, chondrocytes within the cartilage analgen, osteoblasts, and osteocytes within heterotopic bone were all transfected with the DCA-siRNAs.

### DETAILED DESCRIPTION

[0042] The present disclosure, at least in part, relates to the development of isolated nucleic acids (e.g., siRNA molecules) specifically targeting ACVR1^{R206H} allele (referred to as ACVR1^{R206H} allele-specific siRNA), and the use of such siRNAs for treating Fibrodysplasia ossfficans progressiva (FOP). In some embodiments, an ACVR1^{R206H} allele-specific siRNA described herein specifically targets ACVR1^{R206H} allele without affecting the wild-type ACVR1 allele. In some embodiments, an ACVR1^{R206H} allele-specific siRNA described herein is conjugated to Docosanoic acid (DCA) for efficient and sustainable gene silencing. In some embodiments, an ACVR1^{R206H} allele-specific siRNA comprises one or more modified nucleotides. In some embodiments, an ACVR1^{R206H} allele-specific siRNA can be engineered to be a bi-specific siRNAs that targets ACVR1^{R206H} allele and another molecule that is associated with FOP (e.g., Activin A, INHBA, IL-1β, TNF, and myostatin (Mstn). In some embodiments, the present disclosure also provides siRNA sequences targeting INHBA (e.g., human and/or mouse INHBA) or MSTN (e.g., human and/or mouse MSTN).

[0043] Fibrodysplasia ossificans progressiva (FOP, MIM 135100) is a rare autosomal dominant disorder characterized by episodic and progressive heterotopic ossification (HO) of select skeletal muscles, tendons, ligaments, and fascia. The heterotopic bone forms via an endochondral process and is cumulative as it cannot be surgically removed without recurrence. HO in FOP correlated with Bone Morphogenetic Proteins (BMPs) adsorbed into a matrix, which induce the formation of heterotopic bone. Activin Receptor type 1 (ACVR1, MIM 102576), a type I BMP receptor, was identified as the causative gene of FOP. Like all other type I BMP/TGFß receptors, ACVR1 is a single-pass transmembrane protein; its extracellular domain interacts with ligands, whereas its intracellular domain is comprised of a Serine-Glycine-rich region (commonly referred to as the GS domain) and a Serine/Threonine kinase region.

[0044] The first and most common FOP-causing variant to be identified was ACVR1^{R206H} arising from a missense mutation, c.617G>A, p.R206H. Other variants were discovered in small subsets of FOP patients but are rare. Activin A was later identified as the ligand responsible for HO in FOP. Activin A specifically activated FOP-variant ACVR1 (e.g., ACVR1^{R206H}) but not wild type ACVR1. Activin A activates ACVR1^{R206H} and results in Smad1/5/8 phosphorylation, mimicking the signal generated when ACVR1 is engaged by BMPs. In contrast, Activin A does not activate wild-type ACVR1-rather, it forms non-signaling complexes (NSCs) with ACVR1 along with its type II receptor partners that can inhibit BMP signaling mediated by wild-type ACVR1. In some cases, patients with FOP are heterozygous, having one allele that harbors the ACVR1^{R206H} mutation, and a wild type AVCR1 allele.

I. siRNAs

[0045] In some aspects, the present disclosure provides isolated nucleic acids (e.g., siRNAs) specifically targeting ACVR1^{R206H} (referred to as ACVR1^{R206H} specific siRNA. In some aspects, the present disclosure provides siRNAs targeting Activin A (e.g., a subunit of Activin A Inhibitin, beta A (INHBA), or myostatin (MSTN). In some embodiments, an siRNA described herein mediates RNA interference to reduce expression and/or activity of the target gene.

[0046] As used herein, the term “small interfering RNA” (“siRNA”) (also referred to in the art as “short interfering RNAs”) refers to an RNA (or RNA analog) comprising between about 10-50 nucleotides (or nucleotide analogs), which is capable of directing or mediating RNA interference. In certain embodiments, a siRNA comprises between about 15-30 nucleotides or nucleotide analogs, or between about 16-25 nucleotides (or nucleotide analogs), or between about 18-23 nucleotides (or nucleotide analogs), or between about 19-22 nucleotides (or nucleotide analogs) (e.g., 19, 20, 21 or 22 nucleotides or nucleotide analogs). The term “nucleotide analog” or “altered nucleotide” or “modified nucleotide” refers to a non-standard nucleotide, including non-naturally occurring ribonucleotides or deoxyribonucleotides. Exemplary nucleotide analogs are modified at any position so as to alter certain chemical properties of the nucleotide yet retain the ability of the nucleotide analog to perform its intended function. Examples of positions of the nucleotide, which may be derivatized include: the 5 position, e.g., 5-(2-amino)propyl uridine, 5-bromo uridine, 5-propyne uridine, 5-propenyl uridine, etc.; the 6 position, e.g., 6-(2-amino)propyl uridine; and the 8-position for adenosine and/or guanosines, e.g., 8-bromo guanosine, 8-chloro guanosine, 8-fluoroguanosine, etc. Nucleotide analogs also include deaza nucleotides, e.g., 7-deaza-adenosine; O- and N-modified (e.g., alkylated, e.g., N6-methyl adenosine, or as otherwise known in the art) nucleotides; and other heterocyclically modified nucleotide analogs, such as those described in Herdewijn, Antisense Nucleic Acid Drug Dev., 2000 Aug. 10(4):297-310. [0203]Nucleotide analogs may also comprise modifications to the sugar portion of the nucleotides. For example, the 2′ OH— group may be replaced by a group selected from H, OR, R, F, Cl, Br, I, SH, SR, NH2, NHR, NR2, or COOR, wherein R is substituted or unsubstituted Ci-Ce alkyl, alkenyl, alkynyl, aryl, etc. Other possible modifications include those described in U.S. Pat. Nos. 5,858,988, and 6,291,438. The phosphate group of the nucleotide may also be modified, e.g., by substituting one or more of the oxygens of the phosphate group with sulfur (e.g., phosphorothioates), or by making other substitutions, which allow the nucleotide to perform its intended function, such as described in, for example, Eckstein, Antisense Nucleic Acid Drug Dev. 2000 Apr. 10(2): 117-21, Rusckowski et al. Antisense Nucleic Acid Drug Dev. 2000 Oct. 10(5):333-45, Stein, Antisense Nucleic Acid Drug Dev. 2001 Oct. 11(5): 317-25, Vorobjev et al. Antisense Nucleic Acid Drug Dev. 2001 Apr. 11(2):77-85, and U.S. Pat. No. 5,684,143. Certain of the above-referenced modifications (e.g., phosphate group modifications) decrease the rate of hydrolysis of, for example, polynucleotides comprising said analogs in vivo or in vitro.

[0047] As used herein, the term “RNA interference” (“RNAi”) refers to a selective intracellular degradation of RNA. RNAi occurs in cells to remove foreign RNAs (e.g., viral RNAs). Natural RNAi proceeds via fragments cleaved from free dsRNA, which direct the degradative mechanism to other similar RNA sequences. RNAi can be induced by engineered molecules, for example an siRNA, to silence the expression of target genes.

[0048] As used herein, the term “target gene” is a gene whose expression is to be substantially inhibited or “silenced.” This silencing can be achieved by RNA silencing, e.g., by cleaving the mRNA of the target gene or translational repression of the target gene. The term “non-target gene” is a gene whose expression is not to be substantially silenced. In one embodiment, the polynucleotide sequences of the target and non-target gene (e.g. mRNA encoded by the target and non-target genes) can differ by one or more nucleotides. In another embodiment, the target and non-target genes can differ by one or more polymorphisms (e.g., Single Nucleotide Polymorphisms or SNPs). In another embodiment, the target and non-target genes can share less than 100% sequence identity. In another embodiment, the non-target gene may be a homologue (e.g. an orthologue or paralogue) of the target gene. A “target allele” is an allele (e.g., a SNP allele) whose expression is to be selectively inhibited or “silenced.” This silencing can be achieved by RNA silencing, e.g., by cleaving the mRNA of the target gene or target allele by a siRNA. The term “non-target allele” is an allele whose expression is not to be substantially silenced. In certain embodiments, the target and non-target alleles can correspond to the same target gene. In other embodiments, the target allele corresponds to, or is associated with, a target gene, and the non-target allele corresponds to, or is associated with, a non-target gene. In one embodiment, the polynucleotide sequences of the target and non-target alleles can differ by one or more nucleotides. In another embodiment, the target and non-target alleles can differ by one or more allelic polymorphisms (e.g., one or more SNPs). In another embodiment, the target and non-target alleles can share less than 100% sequence identity. The term “polymorphism” as used herein, refers to a variation (e.g., one or more deletions, insertions, or substitutions) in a gene sequence that is identified or detected when the same gene sequence from different sources or subjects (but from the same organism) are compared. For example, a polymorphism can be identified when the same gene sequence from different subjects are compared. Identification of such polymorphisms is routine in the art, the methodologies being similar to those used to detect, for example, breast cancer point mutations. Identification can be made, for example, from DNA extracted from a subject's lymphocytes, followed by amplification of polymorphic regions using specific primers to said polymorphic region. Alternatively, the polymorphism can be identified when two alleles of the same gene are compared. In certain embodiments, the polymorphism is a single nucleotide polymorphism (SNP). A variation in sequence between two alleles of the same gene within an organism is referred to herein as an “allelic polymorphism.” In certain embodiments, the allelic polymorphism corresponds to a SNP allele. For example, the allelic polymorphism may comprise a single nucleotide variation between the two alleles of a SNP. The polymorphism can be at a nucleotide within a coding region but, due to the degeneracy of the genetic code, no change in amino acid sequence is encoded. Alternatively, polymorphic sequences can encode a different amino acid at a particular position, but the change in the amino acid does not affect protein function. Polymorphic regions can also be found in non-encoding regions of the gene. In exemplary embodiments, the polymorphism is found in a coding region of the gene or in an untranslated region (e.g., a 5′ UTR or 3′ UTR) of the gene.

[0049] An RNAi agent, e.g., an RNA silencing agent, having a strand, which is “sequence sufficiently complementary to a target mRNA sequence to direct target-specific RNA interference (RNAi)” means that the strand has a sequence sufficient to trigger the destruction of the target mRNA by the RNAi machinery or process.

[0050] As used herein, the term “heterozygosity” refers to the fraction of individuals within a population that are heterozygous (e.g., contain two or more different alleles) at a particular locus (e.g., at a SNP). Heterozygosity may be calculated for a sample population using methods that are well known to those skilled in the art.

[0051] As used herein, the term “antisense strand” of an RNA silencing agent, e.g., an siRNA or RNA silencing agent, refers to a strand that is substantially complementary to a section of about 10-50 nucleotides, e.g., about 15-30, 16-25, 18-23 or 19-22 nucleotides of the mRNA of the gene targeted for silencing. The antisense strand or first strand has sequence sufficiently complementary to the desired target mRNA sequence to direct target-specific silencing, e.g., complementarity sufficient to trigger the destruction of the desired target mRNA by the RNAi machinery or process (RNAi interference) or complementarity sufficient to trigger translational repression of the desired target mRNA. As used herein, the term “guide strand” refers to a strand of an RNA silencing agent, e.g., an antisense strand of an siRNA duplex or siRNA sequence, that enters into the RISC complex and directs cleavage of the target mRNA.

[0052] The term “sense strand” or “second strand” of an RNA silencing agent, e.g., an siRNA or RNA silencing agent, refers to a strand that is complementary to the antisense strand or first strand. Antisense and sense strands can also be referred to as first or second strands, the first or second strand having complementarity to the target sequence and the respective second or first strand having complementarity to said first or second strand. miRNA duplex intermediates or siRNA-like duplexes include a miRNA strand having sufficient complementarity to a section of about 10-50 nucleotides of the mRNA of the gene targeted for silencing and a miRNA* strand having sufficient complementarity to form a duplex with the miRNA strand.

[0053] As used herein, the term “mismatched base pair” refers to a base pair consisting of non-complementary or non-Watson-Crick base pairs, for example, not normal complementary G:C, A:T or A:U base pairs. As used herein the term “ambiguous base pair” (also known as a non-discriminatory base pair) refers to a base pair formed by a universal nucleotide.

[0054] As used herein, the term “region of complementarity” refers to a nucleotide sequence, e.g., of an oligonucleotide, that is sufficiently complementary to a target region nucleotide sequence, e.g., of target gene mRNA, such that the two nucleotide sequences are capable of annealing to one another under physiological conditions (e.g., in a cell). In some embodiments, a region of complementarity is fully complementary to a nucleotide sequence of target gene mRNA. However, in some embodiments, a region of complementarity is partially complementary to a target nucleotide sequence of the target gene mRNA (e.g., at least 80%, at least 85%, at least 90%, at least 91%, at least 92%, at least 93%, at least 94%, at least 95%, at least 96%, at least 97%, at least 98%, at least 99%, or 100% complementarity). In some embodiments, a region of complementarity contains 1, 2, 3, or 4 mismatches compared with a target nucleotide sequence of target gene mRNA. Complementary, as used herein, refers to the capacity for precise pairing between two nucleotide sequences or two sets of nucleotide sequences. In particular, complementarity is a term that characterizes an extent of hydrogen bond pairing that brings about binding between two nucleotides or two sets of nucleotides. For example, if a base at one position of an oligonucleotide is capable of hydrogen bonding with a base at the corresponding position of target gene mRNA, then the bases are considered to be complementary to each other at that position. Base pairings may include both canonical Watson-Crick base pairing and non-Watson-Crick base pairing (e.g., Wobble base pairing and Hoogsteen base pairing). For example, in some embodiments, for complementary base pairings, adenosine-type bases (A) are complementary to thymidine-type bases (T) or uracil-type bases (U), cytosine-type bases (C) are complementary to guanosine-type bases (G), and universal bases such as 3-nitropyrrole or 5-nitroindole can hybridize to and are considered complementary to any of A, C, G, U, or T. Inosine (I) has also been considered in the art to be a universal base and is considered complementary to any A, C, U, or T.

[0055] siRNA, is a class of RNA molecules (e.g., single stranded or double stranded) that target nucleic acids (e.g., mRNAs) for degradation via the RNA interference (RNAi) pathway in cells. In some embodiments, a siRNA is double stranded. The specificity of siRNA molecules may be determined by the binding of the antisense strand of the molecule to its target RNA. Effective siRNA molecules are generally less than 30 to 35 base pairs in length to prevent the triggering of non-specific RNA interference pathways in the cell via the interferon response, although longer siRNA can also be effective. In some embodiments, the siRNA molecules are 7, 8, 9, 10, 11, 12, 13, 14, 15, 16, 17, 18, 19, 20, 21, 22, 23, 24, 25, 26, 27, 28, 29, 30, 35, 40, 45, 50, or more base pairs in length. In some embodiments, the siRNA molecules are 8 to 30 base pairs in length, 10 to 15 base pairs in length, 10 to 20 base pairs in length, 15 to 25 base pairs in length, 19 to 21 base pairs in length, or 21 to 23 base pairs in length.

[0056] Following selection of an appropriate target RNA sequence, siRNA molecules that comprise a nucleotide sequence complementary to all or a portion of the target sequence, i.e., an antisense sequence, can be designed and prepared using suitable methods (see, e.g., PCT Publication Number WO 2004/016735; and U.S. Patent Publication Nos. 2004-0077574 and 2008-0081791; each of which is incorporated herein by reference).

[0057] The siRNA molecule can be double-stranded (i.e., a dsRNA molecule comprising an antisense strand and a complementary sense strand) or single-stranded (i.e., a siRNA molecule comprising just an antisense strand). The siRNA molecules can comprise a duplex (i.e. comprising annealed sense and antisense strands with a 3′ overhang), asymmetric duplex (i.e. a duplex with 3′ and 5′ antisense overhangs), hairpin (i.e. when two regions of the same strand, usually complementary in nucleotide sequence when read in opposite directions, base-pair to form a double helix that ends in an unpaired loop), or asymmetric hairpin (i.e. hairpin with a strand overhang) secondary structure, having self-complementary sense and antisense strands. In some embodiments, a siRNA described herein comprising an antisense strand and a sense strand.

[0058] In some embodiments, the antisense strand of the siRNA molecule is 7, 8, 9, 10, 11, 12, 13, 14, 15, 16, 17, 18, 19, 20, 21, 22, 23, 24, 25, 26, 27, 28, 29, 30, 35, 40, 45, 50, or more nucleotides in length. In some embodiments, the antisense strand is 8 to 50 nucleotides in length, 8 to 40 nucleotides in length, 8 to 30 nucleotides in length, 10 to 15 nucleotides in length, 10 to 20 nucleotides in length, 15 to 25 nucleotides in length, 19 to 21 nucleotides in length, or 21 to 23 nucleotides in lengths. In some embodiments, the sense strand of the siRNA molecule is 7, 8, 9, 10, 11, 12, 13, 14, 15, 16, 17, 18, 19, 20, 21, 22, 23, 24, 25, 26, 27, 28, 29, 30, 35, 40, 45, 50, or more nucleotides in length. In some embodiments, the sense strand is 8 to 50 nucleotides in length, 8 to 40 nucleotides in length, 8 to 30 nucleotides in length, 10 to 15 nucleotides in length, 10 to 20 nucleotides in length, 15 to 25 nucleotides in length, 19 to 21 nucleotides in length, or 21 to 23 nucleotides in lengths.

i. Human ACVR1^{R206H} Specific siRNAs In some aspects, an siRNA described herein specifically targets human ACVR1^{R206H} nucleic acid sequence (e.g., ACVR1^{R206H} gene and/or ACVR1^{R206H} mRNA). In some embodiments, a target region of an ACVR1^{R206H} specific siRNA comprises the nucleic acid sequence of TCTGGTACAAAGAACAGTGGCTCACCAGATTACACTGTTGGAGTG (SEQ ID NO: 675).

[0059] In some embodiments, an ACVR1^{R206H} specific siRNA described herein comprises a region of complementarity to at least 8, at least 9, at least 10, at least 11, at least 12, at least 13, at least 14, at least 15, at least 16, at least 17, at least 18 at least 19, at least 20, at least 21, at least 22, at least 23, at least 24, at least 25, or more consecutive nucleotides to an ACVR1^{R206H} target nucleic acid sequence as set forth in SEQ ID NO: 675. In some embodiments, an ACVR1^{R206H} specific siRNA described herein comprises a region of complementarity to at least 8, at least 9, at least 10, at least 11, at least 12, at least 13, at least 14, at least 15, at least 16, at least 17, at least 18 at least 19, at least 20, at least 21, at least 22, at least 23, at least 24, at least 25, or more consecutive nucleotides of to an ACVR1^{R206H} target nucleic acid sequence as set forth in SEQ ID NO: 675, except for at least 1, at least 2, at least 3, at least 4, or at least 5 mismatch within the region of complementarity to the nucleotide sequence of SEQ ID NO: 675. Exemplary target sequences for an ACVR1^{R206H} specific siRNA are set forth in Table 6.

[0060] Generally, the sequence in any of the Tables in this disclosure could comprises deoxynucleotide or oxynucleotides. In some embodiments, one or more of the thymine bases (T's) in any one of the oligonucleotides provided in any of the Tables in this disclosure may optionally be uracil bases (U's), and/or one or more of the U's may optionally be T's.

TABLE 6
ACVR1^{R206H} Target Sequence

| Name | Target Sequence | SEQ ID NO |
|---|---|---|
| ACVR1_2 | UACAAAGAACAGUGGCUCAC | 676 |
| ACVR1_3 | ACAAAGAACAGUGGCUCACC | 677 |
| ACVR1_4 | CAAAGAACAGUGGCUCACCA | 678 |
| ACVR1_5 | AAAGAACAGUGGCUCACCAG | 679 |
| ACVR1_6 | AAGAACAGUGGCUCACCAGA | 680 |
| ACVR1_7 | AGAACAGUGGCUCACCAGAU | 681 |
| ACVR1_8 | GAACAGUGGCUCACCAGAUU | 682 |
| ACVR1_9 | AACAGUGGCUCACCAGAUUA | 683 |
| ACVR1_10 | ACAGUGGCUCACCAGAUUAC | 684 |
| ACVR1_11 | CAGUGGCUCACCAGAUUACA | 685 |
| ACVR1_12 | AGUGGCUCACCAGAUUACAC | 686 |
| ACVR1_13 | GUGGCUCACCAGAUUACACU | 687 |
| ACVR1_14 | UGGCUCACCAGAUUACACUG | 688 |
| ACVR1_15 | GGCUCACCAGAUUACACUGU | 689 |
| ACVR1_16 | GCUCACCAGAUUACACUGUU | 690 |
| ACVR1_17 | CUCACCAGAUUACACUGUUG | 691 |
| ACVR1_SNP6_2 | AAGAACAGUGGCUCACCAAA | 692 |
| ACVR1_SNP6_3 | AAGAACAGUGGCUCACCUGA | 693 |
| ACVR1_SNP6_4 | AAGAACAGUGGCUCACAAGA | 694 |
| ACVR1_SNP6_5 | AAGAACAGUGGCUCAACAGA | 695 |
| ACVR1_SNP6_7 | AAGAACAGUGGCUAACCAGA | 696 |
| ACVR1_SNP6_8 | AAGAACAGUGGCACACCAGA | 697 |
| ACVR1_SNP6_9 | AAGAACAGUGGAUCACCAGA | 698 |
| ACVR1_SNP6_10 | AAGAACAGUGUCUCACCAGA | 699 |
| ACVR1_SNP6_11 | AAGAACAGUUGCUCACCAGA | 700 |
| ACVR1_SNP6_12 | AAGAACAGAGGCUCACCAGA | 701 |
| ACVR1_SNP6_13 | AAGAACAUUGGCUCACCAGA | 702 |
| ACVR1_SNP6_14 | AAGAACUGUGGCUCACCAGA | 703 |
| ACVR1_SNP6_15 | AAGAAAAGUGGCUCACCAGA | 704 |
| ACVR1_SNP6_16 | AAGUACAGUGGCUCACCAGA | 705 |
| ACVR1_SNP6_17 | AAGAUCAGUGGCUCACCAGA | 706 |
| ACVR1_SNP8_2 | GAACAGUGGCUCACCAGUUU | 707 |
| ACVR1_SNP8_3 | GAACAGUGGCUCACCAGAAU | 708 |
| ACVR1_SNP8_4 | GAAAAGUGGCUCACCAGAUU | 709 |
| ACVR1_SNP8_5 | GAACUGUGGCUCACCAGAUU | 710 |
| ACVR1_SNP8_6 | GAACAUUGGCUCACCAGAUU | 711 |
| ACVR1_SNP8_7 | GAACAGAGGCUCACCAGAUU | 712 |
| ACVR1_SNP8_9 | GAACAGUUGCUCACCAGAUU | 713 |
| ACVR1_SNP8_10 | GAACAGUGUCUCACCAGAUU | 714 |
| ACVR1_SNP8_11 | GAACAGUGGAUCACCAGAUU | 715 |
| ACVR1_SNP8_12 | GAACAGUGGCACACCAGAUU | 716 |
| ACVR1_SNP8_13 | GAACAGUGGCUAACCAGAUU | 717 |
| ACVR1_SNP8_14 | GAACAGUGGCUCAACAGAUU | 718 |
| ACVR1_SNP8_15 | GAACAGUGGCUCACAAGAUU | 719 |
| ACVR1_SNP8_16 | GAACAGUGGCUCACCUGAUU | 720 |
| ACVR1_SNP8_17 | GAACAGUGGCUCACCAUAUU | 721 |

[0061] In some embodiments, an ACVR1^{R206H} specific siRNA may be at least 80%, at least 85%, at least 90%, at least 91%, at least 92%, at least 93%, at least 94%, at least 95%, at least 96%, at least 97%, at least 98%, at least 99% or 100% complementary to any one of SEQ ID NOs: 676-721. In some embodiments, a complementary nucleotide sequence need not be 100% complementary to that of ACVR1^{R206H} target sequence to be specifically hybridizable or specific for an ACVR1^{R206H}. In some embodiments, the antisense strand of an ACVR1^{R206H} specific siRNA is fully complementarity with all or a portion of its target sequence. In some embodiments, the antisense strand of an ACVR1^{R206H} specific siRNA includes 1, 2, 3, or more mismatches to the target sequence. In some embodiments, an ACVR1^{R206H} specific siRNA comprises an antisense strand comprising a nucleotide sequence that is complementary (e.g., at least 85%, at least 90%, at least 95%, at least 96%, at least 97%, at least 98%, at least 99%, or 100%) to a target RNA sequence as set forth in any one of SEQ ID NOs: 676-721. In some embodiments, an ACVR1^{R206H} specific siRNA comprises an antisense strand comprising a nucleic acid sequence that is complementary to at least 6, at least 7, at least 8, at least 9, at least 10, at least 11, at least 12, at least 13, at least 14, at least 15, at least 16, at least 17, at least 18, at least 19, at least 20, at least 21, at least 22, at least 23, at least 24, at least 25, or more consecutive nucleotides of the sequence as set forth in any one of SEQ ID NOs: 676-721. In some embodiments, an ACVR1^{R206H} specific siRNA comprises an antisense strand comprising a nucleic acid sequence that is complementary the sequence as set forth in any one of SEQ ID NOs: 676-721. Exemplary ACVR1^{R206H} specific siRNA sequences (both antisense and sense strand) are set forth in Tables 7 and 8.

TABLE 7
Exemplary ACVR1^{R206H}
specific siRNA sequences without mismatch

| | | SEQ ID | | SEQ |
|---|---|---|---|---|
| Name | Sense Strand | NO | Antisense Strand | ID NO |
| ACVR1_2 | AAGAACAGUGGCUCAA | 722 | UUGAGCCACUGUUCUUUGUAA | 768 |
| ACVR1_3 | AGAACAGUGGCUCACA | 723 | UGUGAGCCACUGUUCUUUGUA | 769 |
| ACVR1_4 | GAACAGUGGCUCACCA | 724 | UGGUGAGCCACUGUUCUUUGA | 770 |
| ACVR1_5 | AACAGUGGCUCACCAA | 725 | UUGGUGAGCCACUGUUCUUUA | 771 |
| ACVR1_6 | ACAGUGGCUCACCAGA | 726 | UCUGGUGAGCCACUGUUCUUA | 772 |
| ACVR1_7 | CAGUGGCUCACCAGAA | 727 | UUCUGGUGAGCCACUGUUCUA | 773 |
| ACVR1_8 | AGUGGCUCACCAGAUA | 728 | UAUCUGGUGAGCCACUGUUCA | 774 |
| ACVR1_9 | GUGGCUCACCAGAUUA | 729 | UAAUCUGGUGAGCCACUGUUA | 775 |
| ACVR1_10 | UGGCUCACCAGAUUAA | 730 | UUAAUCUGGUGAGCCACUGUA | 776 |
| ACVR1_11 | GGCUCACCAGAUUACA | 731 | UGUAAUCUGGUGAGCCACUGA | 777 |
| ACVR1_12 | GCUCACCAGAUUACAA | 732 | UUGUAAUCUGGUGAGCCACUA | 778 |
| ACVR1_13 | CUCACCAGAUUACACA | 733 | UGUGUAAUCUGGUGAGCCACA | 779 |
| ACVR1_14 | UCACCAGAUUACACUA | 734 | UAGUGUAAUCUGGUGAGCCAA | 780 |
| ACVR1_15 | CACCAGAUUACACUGA | 735 | UCAGUGUAAUCUGGUGAGCCA | 781 |
| ACVR1_16 | ACCAGAUUACACUGUA | 736 | UACAGUGUAAUCUGGUGAGCA | 782 |
| ACVR1_17 | CCAGAUUACACUGUUA | 737 | UAACAGUGUAAUCUGGUGAGA | 783 |

TABLE 8
Exemplary ACVR1^{R206H}
specific siRNA sequences with mismatch

| | | SEQ ID | | SEQ |
|---|---|---|---|---|
| Name | Sense Strand | NO | Antisense Strand | ID NO |
| ACVR1_SNP6_2 | ACAGUGGCUCACCAGA | 738 | UUUGGUGAGCCACUGUUCUUA | 784 |
| ACVR1_SNP6_3 | ACAGUGGCUCACCAGA | 739 | UCAGGUGAGCCACUGUUCUUA | 785 |
| ACVR1_SNP6_4 | ACAGUGGCUCACCAGA | 740 | UCUUGUGAGCCACUGUUCUUA | 786 |
| ACVR1_SNP6_5 | ACAGUGGCUCACCAGA | 741 | UCUGUUGAGCCACUGUUCUUA | 787 |
| ACVR1_SNP6_7 | ACAGUGGCUCACCAGA | 742 | UCUGGUUAGCCACUGUUCUUA | 788 |
| ACVR1_SNP6_8 | ACAGUGGCUCACCAGA | 743 | UCUGGUGUGCCACUGUUCUUA | 789 |
| ACVR1_SNP6_9 | ACAGUGGCUCACCAGA | 744 | UCUGGUGAUCCACUGUUCUUA | 790 |
| ACVR1_SNP6_10 | ACAGUGGCUCACCAGA | 745 | UCUGGUGAGACACUGUUCUUA | 791 |
| ACVR1_SNP6_11 | ACAGUGGCUCACCAGA | 746 | UCUGGUGAGCAACUGUUCUUA | 792 |
| ACVR1_SNP6_12 | ACAGUGGCUCACCAGA | 747 | UCUGGUGAGCCUCUGUUCUUA | 793 |
| ACVR1_SNP6_13 | ACAGUGGCUCACCAGA | 748 | UCUGGUGAGCCAAUGUUCUUA | 794 |
| ACVR1_SNP6_14 | ACAGUGGCUCACCAGA | 749 | UCUGGUGAGCCACAGUUCUUA | 795 |
| ACVR1_SNP6_15 | ACAGUGGCUCACCAGA | 750 | UCUGGUGAGCCACUUUUCUUA | 796 |
| ACVR1_SNP6_16 | ACAGUGGCUCACCAGA | 751 | UCUGGUGAGCCACUGAUCUUA | 797 |
| ACVR1_SNP6_17 | ACAGUGGCUCACCAGA | 752 | UCUGGUGAGCCACUGUACUUA | 798 |
| ACVR1_SNP8_2 | AGUGGCUCACCAGAUA | 752 | UUUCUGGUGAGCCACUGUUCA | 799 |
| ACVR1_SNP8_3 | AGUGGCUCACCAGAUA | 753 | UAACUGGUGAGCCACUGUUCA | 800 |
| ACVR1_SNP8_4 | AGUGGCUCACCAGAUA | 754 | UAUAUGGUGAGCCACUGUUCA | 801 |
| ACVR1_SNP8_5 | AGUGGCUCACCAGAUA | 755 | UAUCAGGUGAGCCACUGUUCA | 802 |
| ACVR1_SNP8_6 | AGUGGCUCACCAGAUA | 756 | UAUCUUGUGAGCCACUGUUCA | 803 |
| ACVR1_SNP8_7 | AGUGGCUCACCAGAUA | 757 | UAUCUGUUGAGCCACUGUUCA | 804 |
| ACVR1_SNP8_9 | AGUGGCUCACCAGAUA | 758 | UAUCUGGUUAGCCACUGUUCA | 805 |
| ACVR1_SNP8_10 | AGUGGCUCACCAGAUA | 759 | UAUCUGGUGUGCCACUGUUCA | 806 |
| ACVR1_SNP8_11 | AGUGGCUCACCAGAUA | 760 | UAUCUGGUGAUCCACUGUUCA | 807 |
| ACVR1_SNP8_12 | AGUGGCUCACCAGAUA | 761 | UAUCUGGUGAGACACUGUUCA | 808 |
| ACVR1_SNP8_13 | AGUGGCUCACCAGAUA | 762 | UAUCUGGUGAGCAACUGUUCA | 809 |
| ACVR1_SNP8_14 | AGUGGCUCACCAGAUA | 763 | UAUCUGGUGAGCCUCUGUUCA | 810 |
| ACVR1_SNP8_15 | AGUGGCUCACCAGAUA | 764 | UAUCUGGUGAGCCAAUGUUCA | 811 |
| ACVR1_SNP8_16 | AGUGGCUCACCAGAUA | 765 | UAUCUGGUGAGCCACAGUUCA | 812 |
| ACVR1_SNP8_17 | AGUGGCUCACCAGAUA | 767 | UAUCUGGUGAGCCACUUUUCA | 813 |

[0062] In some embodiments, an ACVR1^{R206H} specific siRNA comprises an antisense strand that comprises at least 15 consecutive nucleosides of (e.g., at least 15, at least 16, at least 17, at least 18, at least 19, or at least 20) the sequence of any one of SEQ ID NOs: 768-813. In some embodiments, an ACVR1^{R206H} specific siRNA further comprises a sense strand that comprises at least 15 consecutive nucleosides (e.g., at least 15, at least 16, at least 17, at least 18, at least 19, or at least 20) complementary to the sequence of any one of SEQ ID NOs: 768-813. In some embodiments, an ACVR1^{R206H} specific siRNA further comprises a sense strand that comprises at least 15 consecutive nucleosides of (e.g., at least 15, at least 16, at least 17, at least 18, at least 19, or at least 20) the sequence of any one of SEQ ID NOs: 722-767.

[0063] In some embodiments, an ACVR1^{R206H} specific siRNA comprises an antisense strand that is at least 80% (e.g., at least 85%, at least 90%, at least 95%, at least 96%, at least 97%, at least 98%, at least 99%, or 100%) to the sequence of any one of SEQ ID NOs: 768-813. In some embodiments, an ACVR1^{R206H} specific siRNA further comprises a sense strand that comprises a complementary to a sequence at least 80% (e.g., at least 85%, at least 90%, at least 95%, at least 96%, at least 97%, at least 98%, at least 99%, or 100%) identical to the sequence of any one of SEQ ID NOs: 768-813. In some embodiments, an ACVR1^{R206H} specific siRNA further comprises a sense strand that is at least 80% (e.g., at least 85%, at least 90%, at least 95%, at least 96%, at least 97%, at least 98%, at least 99%, or 100%) identical to the sequence of any one of SEQ ID NOs: 722-767.

[0064] In some embodiments, an ACVR1^{R206H} specific siRNA described herein comprises at least one nucleoside modified at the 2′ position of the sugar. In some embodiments, an ACVR1^{R206H} specific siRNA comprises at least one 2′-modified nucleoside. In some embodiments, all of the nucleosides in the oligonucleotide are 2′-modified nucleosides.

[0065] In some embodiments, an ACVR1^{R206H} specific siRNA described herein comprises one or more non-bicyclic 2′-modified nucleosides, e.g., 2′-deoxy, 2′-fluoro (2′-F), 2′-O-methyl (2′-O-Me), 2′-O-methoxyethyl (2′-MOE), 2′-O-aminopropyl (2′-O-AP), 2′-O-dimethylaminoethyl (2′-O-DMAOE), 2′-O-dimethylaminopropyl (2′-O-DMAP), 2′-O-dimethylaminoethyloxyethyl (2′-O-DMAEOE), or 2′-O—N-methylacetamido (2′-O-NMA) modified nucleoside. In some embodiments, an ACVR1^{R206H} specific siRNA comprises one or more 2′-O-methoxyethyl (2′-MOE) modified nucleoside and/or one or more 2′-fluoro (2′-F) modified nucleoside.

[0066] In some embodiments, an ACVR1^{R206H} specific siRNA comprises one or more modified one or more modified internucleotide linkages. In some embodiments, the internucleotide linkage is a phosphorothioate linkage. In some embodiments, an ACVR1^{R206H} specific siRNA further comprises a cholesterol molecule. In some embodiments, an ACVR1^{R206H} specific siRNA is conjugated to the cholesterol by a TEG linker. In some embodiments, an ACVR1^{R206H} specific siRNA is conjugated to a docosanoic acid (DCA). In some embodiments, the DCA is conjugated to the isolated nucleic acid via a cleavable linker. Exemplary an ACVR1^{R206H} specific siRNA with chemical modifications are set forth in Tables 1 and 2.

TABLE 1
Modified ACVR1^{R206H} specific siRNA without mismatch

| | | SEQ |
|---|---|---|
| | | ID |
| Name | | NO |
| | Sense Strand | |
| ACVR1_2 | (mA)#(mA)#(mG)(fA)(mA)(fC)(mA)(fG)(mU)(fG)(mG)(mC)(mU)(fC)#(mA)#(mA)-TegChol | 1 |
| ACVR1_3 | (mA)#(mG)#(mA)(fA)(mC)(fA)(mG)(fU)(mG)(fG)(mC)(mU)(mC)(fA)#(mC)#(mA)-TegChol | 2 |
| ACVR1_4 | (mG)#(mA)#(mA)(fC)(mA)(fG)(mU)(fG)(mG)(fC)(mU)(mC)(mA)(fC)#(mC)#(mA)-TegChol | 3 |
| ACVR1_5 | (mA)#(mA)#(mC)(fA)(mG)(fU)(mG)(fG)(mC)(fU)(mC)(mA)(mC)(fC)#(mA)#(mA)-TegChol | 4 |
| ACVR1_6 | (mA)#(mC)#(mA)(fG)(mU)(fG)(mG)(fC)(mU)(fC)(mA)(mC)(mC)(fA)#(mG)#(mA)-TegChol | 5 |
| ACVR1_7 | (mC)#(mA)#(mG)(fU)(mG)(fG)(mC)(fU)(mC)(fA)(mC)(mC)(mA)(fG)#(mA)#(mA)-TegChol | 6 |
| ACVR1_8 | (mA)#(mG)#(mU)(fG)(mG)(fC)(mU)(fC)(mA)(fC)(mC)(mA)(mG)(fA)#(mU)#(mA)-TegChol | 7 |
| ACVR1_9 | (mG)#(mU)#(mG)(fG)(mC)(fU)(mC)(fA)(mC)(fC)(mA)(mG)(mA)(fU)#(mU)#(mA)-TegChol | 8 |
| ACVR1_10 | (mU)#(mG)#(mG)(fC)(mU)(fC)(mA)(fC)(mC)(fA)(mG)(mA)(mU)(fU)#(mA)#(mA)-TegChol | 9 |
| ACVR1_11 | (mG)#(mG)#(mC)(fU)(mC)(fA)(mC)(fC)(mA)(fG)(mA)(mU)(mU)(fA)#(mC)#(mA)-TegChol | 10 |
| ACVR1_12 | (mG)#(mC)#(mU)(fC)(mA)(fC)(mC)(fA)(mG)(fA)(mU)(mU)(mA)(fC)#(mA)#(mA)-TegChol | 11 |
| ACVR1_13 | (mC)#(mU)#(mC)(fA)(mC)(fC)(mA)(fG)(mA)(fU)(mU)(mA)(mC)(fA)#(mC)#(mA)-TegChol | 12 |
| ACVR1_14 | (mU)#(mC)#(mA)(fC)(mC)(fA)(mG)(fA)(mU)(fU)(mA)(mC)(mA)(fC)#(mU)#(mA)-TegChol | 13 |
| ACVR1_15 | (mC)#(mA)#(mC)(fC)(mA)(fG)(mA)(fU)(mU)(fA)(mC)(mA)(mC)(fU)#(mG)#(mA)-TegChol | 14 |
| ACVR1_16 | (mA)#(mC)#(mC)(fA)(mG)(fA)(mU)(fU)(mA)(fC)(mA)(mC)(mU)(fG)#(mU)#(mA)-TegChol | 15 |
| ACVR1_17 | (mC)#(mC)#(mA)(fG)(mA)(fU)(mU)(fA)(mC)(fA)(mC)(mU)(mG)(fU)#(mU)#(mA)-TegChol | 16 |
| | Antisense Strand | |
| ACVR1_2 | P(mU)#(fU)#(mG)(fA)(fG)(fC)(mC)(fA)(mC)(fU)(mG)(fU)(mU)(fC)#(mU)#(fU)#(mU)#(mG)#(mU)#(mA)#(fA) | 17 |
| ACVR1_3 | P(mU)#(fG)#(mU)(fG)(fA)(fG)(mC)(fC)(mA)(fC)(mU)(fG)(mU)(fU)#(mC)#(fU)#(mU)#(mU)#(mG)#(mU)#(fA) | 18 |
| ACVR1_4 | P(mU)#(fG)#(mG)(fU)(fG)(fA)(mG)(fC)(mC)(fA)(mC)(fU)(mG)(fU)#(mU)#(fC)#(mU)#(mU)#(mU)#(mG)#(fA) | 19 |
| ACVR1_5 | P(mU)#(fU)#(mG)(fG)(fU)(fG)(mA)(fG)(mC)(fC)(mA)(fC)(mU)(fG)#(mU)#(fU)#(mC)#(mU)#(mU)#(mU)#(fA) | 20 |
| ACVR1_6 | P(mU)#(fC)#(mU)(fG)(fG)(fU)(mG)(fA)(mG)(fC)(mC)(fA)(mC)(fU)#(mG)#(fU)#(mU)#(mC)#(mU)#(mU)#(fA) | 21 |
| ACVR1_7 | P(mU)#(fU)#(mC)(fU)(fG)(fG)(mU)(fG)(mA)(fG)(mC)(fC)(mA)(fC)#(mU)#(fG)#(mU)#(mU)#(mC)#(mU)#(fA) | 22 |
| ACVR1_8 | P(mU)#(fA)#(mU)(fC)(fU)(fG)(mG)(fU)(mG)(fA)(mG)(fC)(mC)(fA)#(mC)#(fU)#(mG)#(mU)#(mU)#(mC)#(fA) | 23 |
| ACVR1_9 | P(mU)#(fA)#(mA)(fU)(fC)(fU)(mG)(fG)(mU)(fG)(mA)(fG)(mC)(fC)#(mA)#(fC)#(mU)#(mG)#(mU)#(mU)#(fA) | 24 |
| ACVR1_10 | P(mU)#(fU)#(mA)(fA)(fU)(fC)(mU)(fG)(mG)(fU)(mG)(fA)(mG)(fC)#(mC)#(fA)#(mC)#(mU)#(mG)#(mU)#(fA) | 25 |
| ACVR1_11 | P(mU)#(fG)#(mU)(fA)(fA)(fU)(mC)(fU)(mG)(fG)(mU)(fG)(mA)(fG)#(mC)#(fC)#(mA)#(mC)#(mU)#(mG)#(fA) | 26 |
| ACVR1_12 | P(mU)#(fU)#(mG)(fU)(fA)(fA)(mU)(fC)(mU)(fG)(mG)(fU)(mG)(fA)#(mG)#(fC)#(mC)#(mA)#(mC)#(mU)#(fA) | 27 |
| ACVR1_13 | P(mU)#(fG)#(mU)(fG)(fU)(fA)(mA)(fU)(mC)(fU)(mG)(fG)(mU)(fG)#(mA)#(fG)#(mC)#(mC)#(mA)#(mC)#(fA) | 28 |
| ACVR1_14 | P(mU)#(fA)#(mG)(fU)(fG)(fU)(mA)(fA)(mU)(fC)(mU)(fG)(mG)(fU)#(mG)#(fA)#(mG)#(mC)#(mC)#(mA)#(fA) | 29 |
| ACVR1_15 | P(mU)#(fC)#(mA)(fG)(fU)(fG)(mU)(fA)(mA)(fU)(mC)(fU)(mG)(fG)#(mU)#(fG)#(mA)#(mG)#(mC)#(mC)#(fA) | 30 |
| ACVR1_16 | P(mU)#(fA)#(mC)(fA)(fG)(fU)(mG)(fU)(mA)(fA)(mU)(fC)(mU)(fG)#(mG)#(fU)#(mG)#(mA)#(mG)#(mC)#(fA) | 31 |

m is2′-O-methyl nucleosides;
f is 2′-Fluoro nucleosides;
P is 5′-(E)-Vinylphosphonate;
# is phosphorothioate linkage;
TegChol is TEG linker + cholesterol

TABLE 2
Modified ACVR1^{R206H} specific siRNA without mismatch

| | | SEQ |
|---|---|---|
| | | ID |
| Name | | NO |
| | Sense Strand | |
| ACVR1_SNP6_2 | (mA)#(mC)#(mA)(fG)(mU)(fG)(mG)(fC)(mU)(fC)(mA)(mC)(mC)(fA)#(mG)#(mA)-TegChol | 33 |
| ACVR1_SNP6_3 | (mA)#(mC)#(mA)(fG)(mU)(fG)(mG)(fC)(mU)(fC)(mA)(mC)(mC)(fA)#(mG)#(mA)-TegChol | 34 |
| ACVR1_SNP6_4 | (mA)#(mC)#(mA)(fG)(mU)(fG)(mG)(fC)(mU)(fC)(mA)(mC)(mC)(fA)#(mG)#(mA)-TegChol | 35 |
| ACVR1_SNP6_5 | (mA)#(mC)#(mA)(fG)(mU)(fG)(mG)(fC)(mU)(fC)(mA)(mC)(mC)(fA)#(mG)#(mA)-TegChol | 36 |
| ACVR1_SNP6_7 | (mA)#(mC)#(mA)(fG)(mU)(fG)(mG)(fC)(mU)(fC)(mA)(mC)(mC)(fA)#(mG)#(mA)-TegChol | 37 |
| ACVR1_SNP6_8 | (mA)#(mC)#(mA)(fG)(mU)(fG)(mG)(fC)(mU)(fC)(mA)(mC)(mC)(fA)#(mG)#(mA)-TegChol | 38 |
| ACVR1_SNP6_9 | (mA)#(mC)#(mA)(fG)(mU)(fG)(mG)(fC)(mU)(fC)(mA)(mC)(mC)(fA)#(mG)#(mA)-TegChol | 39 |
| ACVR1_SNP6_10 | (mA)#(mC)#(mA)(fG)(mU)(fG)(mG)(fC)(mU)(fC)(mA)(mC)(mC)(fA)#(mG)#(mA)-TegChol | 40 |
| ACVR1_SNP6_11 | (mA)#(mC)#(mA)(fG)(mU)(fG)(mG)(fC)(mU)(fC)(mA)(mC)(mC)(fA)#(mG)#(mA)-TegChol | 41 |
| ACVR1_SNP6_12 | (mA)#(mC)#(mA)(fG)(mU)(fG)(mG)(fC)(mU)(fC)(mA)(mC)(mC)(fA)#(mG)#(mA)-TegChol | 42 |
| ACVR1_SNP6_13 | (mA)#(mC)#(mA)(fG)(mU)(fG)(mG)(fC)(mU)(fC)(mA)(mC)(mC)(fA)#(mG)#(mA)-TegChol | 43 |
| ACVR1_SNP6_14 | (mA)#(mC)#(mA)(fG)(mU)(fG)(mG)(fC)(mU)(fC)(mA)(mC)(mC)(fA)#(mG)#(mA)-TegChol | 44 |
| ACVR1_SNP6_15 | (mA)#(mC)#(mA)(fG)(mU)(fG)(mG)(fC)(mU)(fC)(mA)(mC)(mC)(fA)#(mG)#(mA)-TegChol | 45 |
| ACVR1_SNP6_16 | (mA)#(mC)#(mA)(fG)(mU)(fG)(mG)(fC)(mU)(fC)(mA)(mC)(mC)(fA)#(mG)#(mA)-TegChol | 46 |
| ACVR1_SNP6_17 | (mA)#(mC)#(mA)(fG)(mU)(fG)(mG)(fC)(mU)(fC)(mA)(mC)(mC)(fA)#(mG)#(mA)-TegChol | 47 |
| ACVR1_SNP8_2 | (mA)#(mG)#(mU)(fG)(mG)(fC)(mU)(fC)(mA)(fC)(mC)(mA)(mG)(fA)#(mU)#(mA)-TegChol | 48 |
| ACVR1_SNP8_3 | (mA)#(mG)#(mU)(fG)(mG)(fC)(mU)(fC)(mA)(fC)(mC)(mA)(mG)(fA)#(mU)#(mA)-TegChol | 49 |
| ACVR1_SNP8_4 | (mA)#(mG)#(mU)(fG)(mG)(fC)(mU)(fC)(mA)(fC)(mC)(mA)(mG)(fA)#(mU)#(mA)-TegChol | 50 |
| ACVR1_SNP8_5 | (mA)#(mG)#(mU)(fG)(mG)(fC)(mU)(fC)(mA)(fC)(mC)(mA)(mG)(fA)#(mU)#(mA)-TegChol | 51 |
| ACVR1_SNP8_6 | (mA)#(mG)#(mU)(fG)(mG)(fC)(mU)(fC)(mA)(fC)(mC)(mA)(mG)(fA)#(mU)#(mA)-TegChol | 52 |
| ACVR1_SNP8_7 | (mA)#(mG)#(mU)(fG)(mG)(fC)(mU)(fC)(mA)(fC)(mC)(mA)(mG)(fA)#(mU)#(mA)-TegChol | 53 |
| ACVR1_SNP8_9 | (mA)#(mG)#(mU)(fG)(mG)(fC)(mU)(fC)(mA)(fC)(mC)(mA)(mG)(fA)#(mU)#(mA)-TegChol | 54 |
| ACVR1_SNP8_10 | (mA)#(mG)#(mU)(fG)(mG)(fC)(mU)(fC)(mA)(fC)(mC)(mA)(mG)(fA)#(mU)#(mA)-TegChol | 55 |
| ACVR1_SNP8_11 | (mA)#(mG)#(mU)(fG)(mG)(fC)(mU)(fC)(mA)(fC)(mC)(mA)(mG)(fA)#(mU)#(mA)-TegChol | 56 |
| ACVR1_SNP8_12 | (mA)#(mG)#(mU)(fG)(mG)(fC)(mU)(fC)(mA)(fC)(mC)(mA)(mG)(fA)#(mU)#(mA)-TegChol | 57 |
| ACVR1_SNP8_13 | (mA)#(mG)#(mU)(fG)(mG)(fC)(mU)(fC)(mA)(fC)(mC)(mA)(mG)(fA)#(mU)#(mA)-TegChol | 58 |
| ACVR1_SNP8_14 | (mA)#(mG)#(mU)(fG)(mG)(fC)(mU)(fC)(mA)(fC)(mC)(mA)(mG)(fA)#(mU)#(mA)-TegChol | 59 |
| ACVR1_SNP8_15 | (mA)#(mG)#(mU)(fG)(mG)(fC)(mU)(fC)(mA)(fC)(mC)(mA)(mG)(fA)#(mU)#(mA)-TegChol | 60 |
| ACVR1_SNP8_16 | (mA)#(mG)#(mU)(fG)(mG)(fC)(mU)(fC)(mA)(fC)(mC)(mA)(mG)(fA)#(mU)#(mA)-TegChol | 61 |
| ACVR1_SNP8_17 | (mA)#(mG)#(mU)(fG)(mG)(fC)(mU)(fC)(mA)(fC)(mC)(mA)(mG)(fA)#(mU)#(mA)-TegChol | 62 |
| | Antisense Strand | |
| ACVR1_SNP6_2 | P(mU)#(fU)#(mU)(fG)(fG)(fU)(mG)(fA)(mG)(fC)(mC)(fA)(mC)(fU)#(mG)#(fU)#(mU)#(mC)#(mU)#(mU)#(fA) | 63 |
| ACVR1_SNP6_3 | P(mU)#(fC)#(mA)(fG)(fG)(fU)(mG)(fA)(mG)(fC)(mC)(fA)(mC)(fU)#(mG)#(fU)#(mU)#(mC)#(mU)#(mU)#(fA) | 64 |
| ACVR1_SNP6_4 | P(mU)#(fC)#(mU)(fU)(fG)(fU)(mG)(fA)(mG)(fC)(mC)(fA)(mC)(fU)#(mG)#(fU)#(mU)#(mC)#(mU)#(mU)#(fA) | 65 |
| ACVR1_SNP6_5 | P(mU)#(fC)#(mU)(fG)(fU)(fU)(mG)(fA)(mG)(fC)(mC)(fA)(mC)(fU)#(mG)#(fU)#(mU)#(mC)#(mU)#(mU)#(fA) | 66 |
| ACVR1_SNP6_7 | P(mU)#(fC)#(mU)(fG)(fG)(fU)(mU)(fA)(mG)(fC)(mC)(fA)(mC)(fU)#(mG)#(fU)#(mU)#(mC)#(mU)#(mU)#(fA) | 67 |
| ACVR1_SNP6_8 | P(mU)#(fC)#(mU)(fG)(fG)(fU)(mG)(fU)(mG)(fC)(mC)(fA)(mC)(fU)#(mG)#(fU)#(mU)#(mC)#(mU)#(mU)#(fA) | 68 |
| ACVR1_SNP6_9 | P(mU)#(fC)#(mU)(fG)(fG)(fU)(mG)(fA)(mU)(fC)(mC)(fA)(mC)(fU)#(mG)#(fU)#(mU)#(mC)#(mU)#(mU)#(fA) | 69 |
| ACVR1_SNP6_10 | P(mU)#(fC)#(mU)(fG)(fG)(fU)(mG)(fA)(mG)(fA)(mC)(fA)(mC)(fU)#(mG)#(fU)#(mU)#(mC)#(mU)#(mU)#(fA) | 70 |
| ACVR1_SNP6_11 | P(mU)#(fC)#(mU)(fG)(fG)(fU)(mG)(fA)(mG)(fC)(mA)(fA)(mC)(fU)#(mG)#(fU)#(mU)#(mC)#(mU)#(mU)#(fA) | 71 |
| ACVR1_SNP6_12 | P(mU)#(fC)#(mU)(fG)(fG)(fU)(mG)(fA)(mG)(fC)(mC)(fU)(mC)(fU)#(mG)#(fU)#(mU)#(mC)#(mU)#(mU)#(fA) | 72 |
| ACVR1_SNP6_13 | P(mU)#(fC)#(mU)(fG)(fG)(fU)(mG)(fA)(mG)(fC)(mC)(fA)(mA)(fU)#(mG)#(fU)#(mU)#(mC)#(mU)#(mU)#(fA) | 73 |
| ACVR1_SNP6_14 | P(mU)#(fC)#(mU)(fG)(fG)(fU)(mG)(fA)(mG)(fC)(mC)(fA)(mC)(fA)#(mG)#(fU)#(mU)#(mC)#(mU)#(mU)#(fA) | 74 |
| ACVR1_SNP6_15 | P(mU)#(fC)#(mU)(fG)(fG)(fU)(mG)(fA)(mG)(fC)(mC)(fA)(mC)(fU)#(mU)#(fU)#(mU)#(mC)#(mU)#(mU)#(fA) | 75 |
| ACVR1_SNP6_16 | P(mU)#(fC)#(mU)(fG)(fG)(fU)(mG)(fA)(mG)(fC)(mC)(fA)(mC)(fU)#(mG)#(fA)#(mU)#(mC)#(mU)#(mU)#(fA) | 76 |
| ACVR1_SNP6_17 | P(mU)#(fC)#(mU)(fG)(fG)(fU)(mG)(fA)(mG)(fC)(mC)(fA)(mC)(fU)#(mG)#(fU)#(mA)#(mC)#(mU)#(mU)#(fA) | 77 |
| ACVR1_SNP8_2 | P(mU)#(fU)#(mU)(fC)(fU)(fG)(mG)(fU)(mG)(fA)(mG)(fC)(mC)(fA)#(mC)#(fU)#(mG)#(mU)#(mU)#(mC)#(fA) | 78 |
| ACVR1_SNP8_3 | P(mU)#(fA)#(mA)(fC)(fU)(fG)(mG)(fU)(mG)(fA)(mG)(fC)(mC)(fA)#(mC)#(fU)#(mG)#(mU)#(mU)#(mC)#(fA) | 79 |
| ACVR1_SNP8_4 | P(mU)#(fA)#(mU)(fA)(fU)(fG)(mG)(fU)(mG)(fA)(mG)(fC)(mC)(fA)#(mC)#(fU)#(mG)#(mU)#(mU)#(mC)#(fA) | 80 |
| ACVR1_SNP8_5 | P(mU)#(fA)#(mU)(fC)(fA)(fG)(mG)(fU)(mG)(fA)(mG)(fC)(mC)(fA)#(mC)#(fU)#(mG)#(mU)#(mU)#(mC)#(fA) | 81 |
| ACVR1_SNP8_6 | P(mU)#(fA)#(mU)(fC)(fU)(fU)(mG)(fU)(mG)(fA)(mG)(fC)(mC)(fA)#(mC)#(fU)#(mG)#(mU)#(mU)#(mC)#(fA) | 82 |
| ACVR1_SNP8_7 | P(mU)#(fA)#(mU)(fC)(fU)(fG)(mU)(fU)(mG)(fA)(mG)(fC)(mC)(fA)#(mC)#(fU)#(mG)#(mU)#(mU)#(mC)#(fA) | 83 |
| ACVR1_SNP8_9 | P(mU)#(fA)#(mU)(fC)(fU)(fG)(mG)(fU)(mU)(fA)(mG)(fC)(mC)(fA)#(mC)#(fU)#(mG)#(mU)#(mU)#(mC)#(fA) | 84 |
| ACVR1_SNP8_10 | P(mU)#(fA)#(mU)(fC)(fU)(fG)(mG)(fU)(mG)(fU)(mG)(fC)(mC)(fA)#(mC)#(fU)#(mG)#(mU)#(mU)#(mC)#(fA) | 85 |
| ACVR1_SNP8_11 | P(mU)#(fA)#(mU)(fC)(fU)(fG)(mG)(fU)(mG)(fA)(mU)(fC)(mC)(fA)#(mC)#(fU)#(mG)#(mU)#(mU)#(mC)#(fA) | 86 |
| ACVR1_SNP8_12 | P(mU)#(fA)#(mU)(fC)(fU)(fG)(mG)(fU)(mG)(fA)(mG)(fA)(mC)(fA)#(mC)#(fU)#(mG)#(mU)#(mU)#(mC)#(fA) | 87 |
| ACVR1_SNP8_13 | P(mU)#(fA)#(mU)(fC)(fU)(fG)(mG)(fU)(mG)(fA)(mG)(fC)(mA)(fA)#(mC)#(fU)#(mG)#(mU)#(mU)#(mC)#(fA) | 88 |
| ACVR1_SNP8_14 | P(mU)#(fA)#(mU)(fC)(fU)(fG)(mG)(fU)(mG)(fA)(mG)(fC)(mC)(fU)#(mC)#(fU)#(mG)#(mU)#(mU)#(mC)#(fA) | 89 |
| ACVR1_SNP8_15 | P(mU)#(fA)#(mU)(fC)(fU)(fG)(mG)(fU)(mG)(fA)(mG)(fC)(mC)(fA)#(mA)#(fU)#(mG)#(mU)#(mU)#(mC)#(fA) | 90 |
| ACVR1_SNP8_16 | P(mU)#(fA)#(mU)(fC)(fU)(fG)(mG)(fU)(mG)(fA)(mG)(fC)(mC)(fA)#(mC)#(fA)#(mG)#(mU)#(mU)#(mC)#(fA) | 91 |
| ACVR1_SNP8_17 | P(mU)#(fA)#(mU)(fC)(fU)(fG)(mG)(fU)(mG)(fA)(mG)(fC)(mC)(fA)#(mC)#(fU)#(mU)#(mU)#(mU)#(mC)#(fA) | 92 |

m is2′-O-methyl nucleosides;
f is 2′-Fluoro nucleosides;
P is 5′-(E)-Vinylphosphonate;
# is phosphorothioate linkage;
TegChol is TEG linker + cholesterol

[0067] In some embodiments, ACVR1^{R206H} specific siRNA comprises an anti-sense strand that comprises the nucleic acid sequence with chemical modification pattern set forth in Table 1 or 2. In some embodiments, ACVR1^{R206H} specific siRNA comprises an anti-sense strand that comprises the nucleic acid sequence with chemical modification pattern as set forth in SEQ ID NOs: 17-32, and 63-92. In some embodiments, ACVR1^{R206H} specific siRNA comprises a sense strand that comprises the nucleic acid sequence with chemical modification pattern set forth in Table 1 or 2. In some embodiments, ACVR1^{R206H} specific siRNA comprises a sense strand that comprises the nucleic acid sequence with chemical modification pattern as set forth in SEQ ID NOs: 1-16, and 33-62.

ii. Human and Mouse INHBA Specific siRNAs

[0068] In some aspects, an siRNA described herein specifically targets INHBA nucleic acid sequence (e.g., INHBA gene and/or INHBA mRNA). In some embodiments, an siRNA described herein specifically targets mouse and/or INHBA nucleic acid sequence (referred to as INHBA specific siRNA). Exemplary nucleic acid sequence encoding human INHBA is set forth in SEQ ID NO: 814:

ATGCCCTTGCTTTGGCTGAGAGGATTTCTGTTGGCAAGTTGCTGGATTATAGTGAGGAGTTCCCCCACCC
CAGGATCCGAGGGGCACAGCGCGGCCCCCGACTGTCCGTCCTGTGCGCTGGCCGCCCTCCCAAAGGATGT
ACCCAACTCTCAGCCAGAGATGGTGGAGGCCGTCAAGAAGCACATTTTAAACATGCTGCACTTGAAGAAG
AGACCCGATGTCACCCAGCCGGTACCCAAGGCGGCGCTTCTGAACGCGATCAGAAAGCTTCATGTGGGCA
AAGTCGGGGAGAACGGGTATGTGGAGATAGAGGATGACATTGGAAGGAGGGCAGAAATGAATGAACTTAT
GGAGCAGACCTCGGAGATCATCACGTTTGCCGAGTCAGGAACAGCCAGGAAGACGCTGCACTTCGAGATT
TCCAAGGAAGGCAGTGACCTGTCAGTGGTGGAGCGTGCAGAAGTCTGGCTCTTCCTAAAAGTCCCCAAGG
CCAACAGGACCAGGACCAAAGTCACCATCCGCCTCTTCCAGCAGCAGAAGCACCCGCAGGGCAGCTTGGA
CACAGGGGAAGAGGCCGAGGAAGTGGGCTTAAAGGGGGAGAGGAGTGAACTGTTGCTCTCTGAAAAAGTA
GTAGACGCTCGGAAGAGCACCTGGCATGTCTTCCCTGTCTCCAGCAGCATCCAGCGGTTGCTGGACCAGG
GCAAGAGCTCCCTGGACGTTCGGATTGCCTGTGAGCAGTGCCAGGAGAGTGGCGCCAGCTTGGTTCTCCT
GGGCAAGAAGAAGAAGAAAGAAGAGGAGGGGGAAGGGAAAAAGAAGGGCGGAGGTGAAGGTGGGGCAGGA
GCAGATGAGGAAAAGGAGCAGTCGCACAGACCTTTCCTCATGCTGCAGGCCCGGCAGTCTGAAGACCACC
CTCATCGCCGGCGTCGGCGGGGCTTGGAGTGTGATGGCAAGGTCAACATCTGCTGTAAGAAACAGTTCTT
TGTCAGTTTCAAGGACATCGGCTGGAATGACTGGATCATTGCTCCCTCTGGCTATCATGCCAACTACTGC
GAGGGTGAGTGCCCGAGCCATATAGCAGGCACGTCCGGGTCCTCACTGTCCTTCCACTCAACAGTCATCA
ACCACTACCGCATGCGGGGCCATAGCCCCTTTGCCAACCTCAAATCGTGCTGTGTGCCCACCAAGCTGAG
ACCCATGTCCATGTTGTACTATGATGATGGTCAAAACATCATCAAAAAGGACATTCAGAACATGATCGTG
GAGGAGTGTGGGTGCTCATAG

[0069] Exemplary nucleic acid sequence encoding mouse Inhba is set forth in SEQ ID NO: 815.

ATGCCCTTGCTTTGGCTGAGAGGATTTCTGTTGGCAAGTTGCTGGATTATAGTGAGGAGTTCCCCCACCC
CAGGATCCGAGGGGCACGGCTCAGCCCCGGACTGCCCGTCCTGTGCGCTGGCCACCCTTCCGAAGGATGG
ACCTAACTCTCAGCCAGAGATGGTAGAGGCTGTCAAGAAGCACATCTTAAACATGCTGCACTTGAAGAAG
AGACCCGATGTCACCCAGCCGGTGCCCAAGGCGGCGCTTCTCAACGCGATCAGAAAGCTTCATGTGGGTA
AAGTGGGGGAGAACGGGTATGTGGAGATAGAGGACGACATTGGCAGGAGGGCCGAAATGAATGAACTCAT
GGAGCAGACCTCGGAGATCATCACCTTTGCCGAGTCAGGCACAGCCAGGAAGACACTGCACTTTGAGATT
TCCAAGGAAGGCAGTGACCTGTCAGTAGTGGAGCGTGCAGAAGTGTGGCTCTTCCTGAAAGTCCCCAAGG
CTAACAGAACCAGGACCAAAGTCACCATCCGTCTATTTCAGCAGCAGAAGCACCCACAGGGCAGCTTGGA
CACGGGGGATGAGGCCGAGGAAATGGGCTTAAAGGGGGAGAGGAGTGAACTGTTGCTATCAGAGAAAGTA
GTTGATGCTCGGAAGAGTACCTGGCACATCTTTCCAGTGTCCAGCAGCATCCAGCGCCTGCTGGACCAGG
GAAAGAGTTCCCTGGACGTGCGGATTGCTTGTGAGCAGTGCCAGGAGAGTGGTGCCAGTCTAGTGCTTCT
GGGCAAGAAGAAGAAGAAAGAGGTGGATGGAGATGGGAAGAAGAAAGATGGGAGTGACGGAGGGCTGGAA
GAGGAAAAGGAACAGTCACATAGACCTTTCCTCATGCTGCAGGCTAGGCAGTCCGAAGACCACCCTCATC
GCAGGCGTAGGCGGGGCTTGGAGTGCGACGGCAAGGTCAACATTTGCTGTAAGAAACAGTTCTTTGTCAG
CTTCAAGGACATTGGCTGGAATGACTGGATCATTGCTCCCTCTGGCTATCACGCCAATTATTGTGAGGGG
GAGTGCCCAAGCCACATAGCAGGCACCTCTGGGTCCTCGCTCTCCTTCCACTCAACAGTCATTAACCACT
ACCGCATGAGGGGTCACAGCCCCTTTGCCAACCTTAAGTCATGCTGTGTGCCCACCAAGCTGAGACCCAT
GTCCATGCTGTATTACGATGATGGTCAAAACATCATCAAAAAGGACATTCAAAACATGATTGTGGAGGAG
TGTGGCTGCTCCTAG

[0070] Exemplary INHBA target gene region sequences and corresponding target sequences are set forth in Table 9.

TABLE 9
Human INHBA and mouse Inhba target gene regions sequences and target
sequences

| | | SEQ | | SEQ ID |
|---|---|---|---|---|
| Name | Target Sequence | ID NO | Target region | NO |
| INHBA_ | UCAACUAUGUCAAUGGUU | 913 | TTATATGAGTGCATTTCAACTATGT | 817 |
| XM_017012174_ | UC | | CAATGGTTTCTTAATATTTA | |
| 5785 | | | | |
| INHBA_ | AUGGCCAUGUUCAACUUU | 914 | TTAAGGCAAGAGTAGATGGCCATGT | 818 |
| XM_017012174_ | AC | | TCAACTTTACAAAATTTCTT | |
| 4169 | | | | |
| INHBA_ | ACCCAUAUUAUCAUAUUC | 915 | TTGTATTAAGCACGGACCCATATTA | 819 |
| XM_017012174_ | AC | | TCATATTCACTTAAAAAAAT | |
| 5169 | | | | |
| INHBA_ | AAUAAUUGGGAACAAUUA | 916 | TGGAAAAAAGTTTCTAATAATTGGG | 820 |
| XM_017012174_ | CA | | AACAATTACATTAATTAATA | |
| 3792 | | | | |
| INHBA_ | UUAGCCCUAUGUCAAUUU | 917 | AAAATATTGAAGCTTTTAGCCCTAT | 821 |
| XM_017012174_ | GU | | GTCAATTTGTAGATTAAAAT | |
| 3843 | | | | |
| INHBA_ | UGUUGGAUCCAAACAUUU | 918 | ATATGTTTGTCCATCTGTTGGATCC | 822 |
| XM_017012174_ | CU | | AAACATTTCTATATTTTGTA | |
| 2395 | | | | |
| INHBA_ | AAAGAGAUAACAGUUUGA | 919 | ATTTACAATATGTTTAAAGAGATAA | 823 |
| XM_017012174_ | UA | | CAGTTTGATATGTTTTCATG | |
| 5857 | | | | |
| INHBA_ | GGACCCAUAUUAUCAUAU | 920 | AGTTGTATTAAGCACGGACCCATAT | 824 |
| XM_017012174_ | UC | | TATCATATTCACTTAAAAAA | |
| 5167 | | | | |
| INHBA_ | AUGGGAUUCUUAGUAGUA | 921 | TTTAAATTATAACATATGGGATTCT | 825 |
| XM_017012174_ | UG | | TAGTAGTATGTTTTTTTCTT | |
| 4722 | | | | |
| INHBA_ | UAGCCCUAUGUCAAUUUG | 922 | AAATATTGAAGCTTTTAGCCCTATG | 826 |
| XM_017012174_ | UA | | TCAATTTGTAGATTAAAATA | |
| 3844 | | | | |
| INHBA_ | UGGGUUAUCAAACACCCA | 923 | TGGATATTGAGTGATTGGGTTATCA | 827 |
| XM_017012174_ | CA | | AACACCCACAAACTTTAATT | |
| 4519 | | | | |
| INHBA_ | GGGAACAAUUACAUUAAU | 924 | AAGTTTCTAATAATTGGGAACAATT | 828 |
| XM_017012174_ | UA | | ACATTAATTAATATTTTGTA | |
| 3799 | | | | |
| INHBA_ | UCUAAUAAUUGGGAACAA | 925 | AAATGGAAAAAAGTTTCTAATAATT | 829 |
| XM_017012174_ | UU | | GGGAACAATTACATTAATTA | |
| 3789 | | | | |
| INHBA_ | AAAGGUAGAACAAAUACU | 926 | CCCTGCAGTCTCCTTAAAGGTAGAA | 830 |
| XM_017012174_ | UU | | CAAATACTTTCTATTTTTTT | |
| 5059 | | | | |
| INHBA_ | AUAGCAGAAGUUAUUUAU | 927 | TGTTTTCATGTGTTTATAGCAGAAG | 831 |
| XM_017012174_ | UU | | TTATTTATTTCTATGGCATT | |
| 5892 | | | | |
| INHBA_ | UUAAGCACUUCAGGCUGU | 928 | ATGTCCATACACATTTTAAGCACTT | 832 |
| XM_017012174_ | CA | | CAGGCTGTCATTTTTTAATG | |
| 2977 | | | | |
| INHBA_ | UAUAACAUAUGGGAUUCU | 929 | GTAAAGGCTTTAAATTATAACATAT | 833 |
| XM_017012174_ | UA | | GGGATTCTTAGTAGTATGTT | |
| 4714 | | | | |
| INHBA_ | UAUGCAACCUAAUAGGUU | 930 | TTATGATCTTAGAACTATGCAACCT | 834 |
| XM_017012174_ | UG | | AATAGGTTTGAAACTGTTTA | |
| 2262 | | | | |
| INHBA_ | AACCACAUGUCUCAGCUA | 931 | TCAAGAGCAGAAGCAAACCACATGT | 835 |
| XM_017012174_ | UA | | CTCAGCTATATTATTATTTA | |
| 5419 | | | | |
| INHBA_ | UAUGGAAAGAAUGAAAGA | 932 | AAAATTGAGAACAAGTATGGAAAGA | 836 |
| XM_017012174_ | UC | | ATGAAAGATCAAGGAAAAAA | |
| 2188 | | | | |
| INHBA_ | GAGGGCAGAAAUGAAUGA | 933 | GGATGACATTGGAAGGAGGGCAGAA | 837 |
| XM_017012174_ | AC | | ATGAATGAACTTATGGAGCA | |
| 556 | | | | |
| INHBA_ | AGACCCAUGUCCAUGUUG | 934 | GTGCCCACCAAGCTGAGACCCATGT | 838 |
| XM_017012174_ | UA | | CCATGTTGTACTATGATGAT | |
| 1418 | | | | |
| INHBA_ | UUUAAUAGUAACAUGUAU | 935 | TGTCTTTAAATATCTTTTAATAGTA | 839 |
| XM_017012174_ | UU | | ACATGTATTTTATGGACCAA | |
| 4878 | | | | |
| INHBA_ | AUGGCUUUGAAAUAGAAG | 936 | TTTTGTTAAATTTATATGGCTTTGA | 840 |
| XM_017012174_ | UA | | AATAGAAGTATAAGTTGCTA | |
| 4562 | | | | |
| INHBA_ | UUUAAAGAGAUAACAGUU | 937 | TTTATTTACAATATGTTTAAAGAGA | 841 |
| XM_017012174_ | UG | | TAACAGTTTGATATGTTTTC | |
| 5854 | | | | |
| INHBA_ | UUGACAAUGGGUUGAUAU | 938 | TTGAAAAACAGTGCATTGACAATGG | 842 |
| XM_017012174_ | UU | | GTTGATATTTTTCTTTAAAA | |
| 5535 | | | | |
| INHBA_ | ACAGUAGUUGUACACUGU | 939 | TTTCATACTGGATGTACAGTAGTTG | 843 |
| XM_017012174_ | UG | | TACACTGTTGGATATCAAGT | |
| 2839 | | | | |
| INHBA_ | GUGUUUAUAGCAGAAGUU | 940 | TTGATATGTTTTCATGTGTTTATAG | 844 |
| XM_017012174_ | AU | | CAGAAGTTATTTATTTCTAT | |
| 5886 | | | | |
| INHBA_ | UAAGGCAAGAGUAGAUGG | 941 | TGGTGAGAAAAGTTTTAAGGCAAGA | 845 |
| XM_017012174_ | CC | | GTAGATGGCCATGTTCAACT | |
| 4155 | | | | |
| INHBA_ | UUGUGCAUAUGCAUAUCU | 942 | GTATATATACATTGCTTGTGCATAT | 846 |
| XM_017012174_ | GU | | GCATATCTGTATGTATATAT | |
| 2918 | | | | |
| INHBA_ | AAGAUAAUCUGAAGCCUG | 943 | ATAATTATGAAAGCCAAGATAATCT | 847 |
| XM_017012174_ | UU | | GAAGCCTGTTTTATTTTAAA | |
| 5587 | | | | |
| INHBA_ | UUUAAGGUUUCUGAGUUA | 944 | CAAAATGAAGAAATTTTTAAGGTTT | 848 |
| XM_017012174_ | AC | | CTGAGTTAACCAGAAAAATA | |
| 1579 | | | | |
| INHBA_ | GUUGGAUCCAAACAUUUC | 945 | TATGTTTGTCCATCTGTTGGATCCA | 849 |
| XM_017012174_ | UA | | AACATTTCTATATTTTGTAA | |
| 2396 | | | | |
| INHBA_ | AGAAGCAGAGAAAUGUAA | 946 | GTGACCACAGTTATCAGAAGCAGAG | 850 |
| XM_017012174_ | UU | | AAATGTAATTCCATATTTTA | |
| 4449 | | | | |
| INHBA_ | UUUGUAUUGGAAGUAAUC | 947 | AAAAAGAGAGACTTTTTTGTATTGG | 851 |
| XM_017012174_ | UG | | AAGTAATCTGATTAATTTTT | |
| 2320 | | | | |
| INHBA_ | GUGCAUAUGCAUAUCUGU | 948 | ATATATACATTGCTTGTGCATATGC | 852 |
| XM_017012174_ | AU | | ATATCTGTATGTATATATAC | |
| 2920 | | | | |
| INHBA_ | UUGUAUUGGAAGUAAUCU | 949 | AAAAGAGAGACTTTTTTGTATTGGA | 853 |
| XM_017012174_ | GA | | AGTAATCTGATTAATTTTTA | |
| 2321 | | | | |
| INHBA_ | ACUGGGCAAAUACACUUA | 950 | GTAGGCAATGTCACTACTGGGCAAA | 854 |
| XM_017012174_ | CU | | TACACTTACTGTGTTCTAGA | |
| 3999 | | | | |
| INHBA_ | ACACCAAUCUUAGAAGCU | 951 | CTTAAAAATCTGCCCACACCAATCT | 855 |
| XM_017012174_ | CU | | TAGAAGCTCTGAAAAGAATT | |
| 4833 | | | | |
| INHBA_ | UUCAACUAUGUCAAUGGU | 952 | TTTATATGAGTGCATTTCAACTATG | 856 |
| XM_017012174_ | UU | | TCAATGGTTTCTTAATATTT | |
| 5784 | | | | |
| INHBA_ | AUGGUUUCUUAAUAUUUA | 953 | ATTTCAACTATGTCAATGGTTTCTT | 857 |
| XM_017012174_ | UU | | AATATTTATTGTGTAGAAGT | |
| 5797 | | | | |
| INHBA_ | CCAACCAAUUUCAUAUUU | 954 | TCTTATCCCAGAAGACCAACCAATT | 858 |
| XM_017012174_ | AU | | TCATATTTATTTAAGATTGA | |
| 4988 | | | | |
| INHBA_ | UUAACCAAUGUCUGUUUG | 955 | ACTACATGCAGTTCTTTAACCAATG | 859 |
| XM_017012174_ | GC | | TCTGTTTGGCTAATGTAATT | |
| 5728 | | | | |
| INHBA_ | AAUCUUAAAUCAGAAGCU | 956 | GTGTCTATTGGAATCAATCTTAAAT | 860 |
| XM_017012174_ | UU | | CAGAAGCTTTTTCAGAAAAA | |
| 3297 | | | | |
| INHBA_ | UGUAUCACUGAGAAGCUG | 957 | GTTTAAATTAAACCCTGTATCACTG | 861 |
| XM_017012174_ | UU | | AGAAGCTGTTGTATGGGTCA | |
| 5341 | | | | |
| INHBA_ | UUAAGAAGGAUAGGCUAU | 958 | CAAAACACAGTATTTTTAAGAAGGA | 862 |
| XM_017012174_ | AG | | TAGGCTATAGTTTTTGCTTT | |
| 3048 | | | | |
| INHBA_ | AAUACCAAGUUACAUUUC | 959 | GATCAAGGAAAAAAGAATACCAAGT | 863 |
| XM_017012174_ | GU | | TACATTTCGTTAAGGTGCTT | |
| 2219 | | | | |
| INHBA_ | UAUAGCAGAAGUUAUUUA | 960 | ATGTTTTCATGTGTTTATAGCAGAA | 864 |
| XM_017012174_ | UU | | GTTATTTATTTCTATGGCAT | |
| 5891 | | | | |
| Inhba_NM_ | UCAACUAUGUCAAUGGUU | 961 | TTATATGAGTGCATTTCAACTATGT | 865 |
| 008380_6118 | UC | | CAATGGTTTCTTAATATTTA | |
| Inhba_NM_ | UUUAACAAUAUUAGAUAU | 962 | TTAAATTGCTAATATTTTAACAATA | 866 |
| 008380_5037 | UG | | TTAGATATTGTTAACAATTT | |
| Inhba_NM_ | GUUGGAUUCAAACAUUUC | 963 | TATGTTTGTCCATCTGTTGGATTCA | 867 |
| 008380_2941 | UA | | AACATTTCTATATTTTGTAA | |
| Inhba_NM_ | UGUUGGAUUCAAACAUUU | 964 | ATATGTTTGTCCATCTGTTGGATTC | 868 |
| 008380_2940 | CU | | AAACATTTCTATATTTTGTA | |
| Inhba_NM_ | CUAAUCAGUUAUUCAUUU | 965 | GCTTGTCTAAAACAGCTAATCAGTT | 869 |
| 008380_4144 | AC | | ATTCATTTACATATTTAAAA | |
| Inhba_NM_ | UGCAAUAGAAUUUAAAUU | 966 | AAATTTGTATGGCCTTGCAATAGAA | 870 |
| 008380_5011 | GC | | TTTAAATTGCTAATATTTTA | |
| Inhba_NM_ | UAUUAUAAUUAUAAUUAU | 967 | AATAGCTATTTTTATTATTATAATT | 871 |
| 008380_3138 | UA | | ATAATTATTATTATTATTTT | |
| Inhba_NM_ | UAUGCAACCUAAUAGGUU | 968 | TTTTGATCCTAGAACTATGCAACCT | 872 |
| 008380_2807 | UG | | AATAGGTTTGAAACTGTTTA | |
| Inhba_NM_ | UUAAGCACUUCAGGCUGU | 969 | ATGTCCATACACATTTTAAGCACTT | 873 |
| 008380_3507 | CA | | CAGGCTGTCATTTTAAAAAT | |
| Inhba_NM_ | AGCGCCCUCUGAACUGUU | 970 | TTGTGAAAAACCTTTAGCGCCCTCT | 874 |
| 008380_4669 | UC | | GAACTGTTTCTTTAGTATTG | |
| Inhba_NM_ | UUAACAAUAUUAGAUAUU | 971 | TAAATTGCTAATATTTTAACAATAT | 875 |
| 008380_5038 | GU | | TAGATATTGTTAACAATTTA | |
| Inhba_NM_ | UUAAAGAGAUAACGGUUG | 972 | TTATTTACGATATGTTTAAAGAGAT | 876 |
| 008380_6187 | GA | | AACGGTTGGATATGTTTTCA | |
| Inhba_NM_0 | UUUAGCAUUAAGUCAGUC | 973 | TAAAATATTGAAGCTTTTAGCATTA | 877 |
| 08380_4287 | CA | | AGTCAGTCCATAGATTAAAG | |
| Inhba_NM_0 | UCAGUUAUUCAUUUACAU | 974 | GTCTAAAACAGCTAATCAGTTATTC | 878 |
| 08380_4148 | AU | | ATTTACATATTTAAAATATA | |
| Inhba_NM_ | GUCCAUAGAUUAAAGUCA | 975 | TTTAGCATTAAGTCAGTCCATAGAT | 879 |
| 008380_4302 | UU | | TAAAGTCATTGTAGGAAAAT | |
| Inhba_NM_ | CAUAAAGUGAAUCAUUUC | 976 | TTATTTATTTTTATGCATAAAGTGA | 880 |
| 008380_5824 | UU | | ATCATTTCTTCTGTATTAAT | |
| Inhba_NM_ | GGCCUUGCAAUAGAAUUU | 977 | TCATCAAATTTGTATGGCCTTGCAA | 881 |
| 008380_5006 | AA | | TAGAATTTAAATTGCTAATA | |
| Inhba_NM_ | GGGAGUUGUACAAAUCUC | 978 | AGCACTCAGGAGCCAGGGAGTTGTA | 882 |
| 008380_3981 | UA | | CAAATCTCTAATATTCTATT | |
| Inhba_NM_ | AUUGACAAUGGUUGAUAU | 979 | TTTGAAAAACAGTGCATTGACAATG | 883 |
| 008380_5900 | UU | | GTTGATATTTTTCTTTAAAA | |
| Inhba_NM_ | UAUAGCAGAAGUUAUUUA | 980 | ATGTTTTCATGTGTTTATAGCAGAA | 884 |
| 008380_6223 | UU | | GTTATTTATTTCTATTCCAT | |
| Inhba_NM_ | ACCGUCAAUAUACCUUAU | 981 | ATATGTATTAAATATACCGTCAATA | 885 |
| 008380_4413 | CA | | TACCTTATCACATTAGGCTG | |
| Inhba_NM_ | ACGGACUUGUUUGAAGUU | 982 | TAGAGCCTTATTTTTACGGACTTGT | 886 |
| 008380_4191 | UG | | TTGAAGTTTGAAAAACTTTA | |
| Inhba_NM_ | GGCUAAUGUAAUUAAAGU | 983 | CTTTAACCAATGTCTGGCTAATGTA | 887 |
| 008380_6078 | UG | | ATTAAAGTTGTTAATTTATA | |
| Inhba_NM_ | UCAGCUAUAUUAUUAUUU | 984 | AGCAAATCACGTGTCTCAGCTATAT | 888 |
| 008380_5797 | AU | | TATTATTTATTTTTATGCAT | |
| Inhba_NM_ | UGCAUAAGAAAUGAAUUA | 985 | AGGAAATGCATGTACTGCATAAGAA | 889 |
| 008380_4535 | UA | | ATGAATTATAATTAAGGTCT | |
| Inhba_NM_ | UACAGUAGUGUACACUGU | 986 | ATTTCATACTGGATGTACAGTAGTG | 890 |
| 008380_3372 | UG | | TACACTGTTGGATTATCAAG | |
| Inhba_NM_ | UAUAAUUAUAAUUAUUAU | 987 | AGCTATTTTTATTATTATAATTATA | 891 |
| 008380_3141 | UA | | ATTATTATTATTATTTTGTA | |
| Inhba_NM_ | UUGUACAAAUCUCUAAUA | 988 | TCAGGAGCCAGGGAGTTGTACAAAT | 892 |
| 008380_3986 | UU | | CTCTAATATTCTATTTTGCA | |
| Inhba_NM_ | GUGCAUAUGCAUAUCUGU | 989 | ATATATACATTGCTTGTGCATATGC | 893 |
| 008380_3450 | AU | | ATATCTGTATGTATATATAC | |
| Inhba_NM_ | UUCAACUUAUAUUUAUUA | 990 | AAATGGGCTGATTTTTTCAACTTAT | 894 |
| 008380_3810 | UU | | ATTTATTATTTATTGGAATC | |
| Inhba_NM_ | UCAGCAAUGCCCGAUAGC | 991 | GTTAGTAGGCAGTATTCAGCAATGC | 895 |
| 008380_6318 | UU | | CCGATAGCTTCTTTGGCCTT | |
| Inhba_NM_ | UUCAACUAUGUCAAUGGU | 992 | TTTATATGAGTGCATTTCAACTATG | 896 |
| 008380_6117 | UU | | TCAATGGTTTCTTAATATTT | |
| Inhba_NM_ | AUGGUUUCUUAAUAUUUA | 993 | ATTTCAACTATGTCAATGGTTTCTT | 897 |
| 008380_6130 | UU | | AATATTTATTTTGTAGAAGT | |
| Inhba_NM_ | AUGGGAAGAGCAGGAUUU | 994 | GAGATGATCTAGACCATGGGAAGAG | 898 |
| 008380_4771 | AU | | CAGGATTTATGTAACTACTA | |
| Inhba_NM_ | UUUGCCAACCUUAAGUCA | 995 | AGGGGTCACAGCCCCTTTGCCAACC | 899 |
| 008380_1767 | UG | | TTAAGTCATGCTGTGTGCCC | |
| Inhba_NM_ | AGUGCAUUGACAAUGGUU | 996 | AATGCTTTGAAAAACAGTGCATTGA | 900 |
| 008380_5895 | GA | | CAATGGTTGATATTTTTCTT | |
| Inhba_NM_ | GCUAAUGUAAUUAAAGUU | 997 | TTTAACCAATGTCTGGCTAATGTAA | 901 |
| 008380_6079 | GU | | TTAAAGTTGTTAATTTATAT | |
| Inhba_NM_ | UUUAAGAAGGAUAAGUGA | 998 | GCAAAACACAGTATTTTTAAGAAGG | 902 |
| 008380_3578 | UA | | ATAAGTGATAGATTTTTTTT | |
| Inhba_NM_ | GUCUAUGUGACACUAUCU | 999 | CCAGGTTATAAGTATGTCTATGTGA | 903 |
| 008380_2405 | CU | | CACTATCTCTGTGTATTTCA | |
| Inhba_NM_ | AAUACCAAGUUACAUUUC | 1000 | GACCAAGGGAAGAAGAATACCAAGT | 904 |
| 008380_2764 | GU | | TACATTTCGTTAAGGTGCTT | |
| Inhba_NM_ | CUUGAAAGGAAUAUGUUU | 1001 | CTTCAAGGAGAGATACTTGAAAGGA | 905 |
| 008380_2915 | GU | | ATATGTTTGTCCATCTGTTG | |
| Inhba_NM_ | GUGUUUAUAGCAGAAGUU | 1002 | TGGATATGTTTTCATGTGTTTATAG | 906 |
| 008380_6218 | AU | | CAGAAGTTATTTATTTCTAT | |
| Inhba_NM_ | AUGGCCUUGCAAUAGAAU | 1003 | ACTCATCAAATTTGTATGGCCTTGC | 907 |
| 008380_5004 | UU | | AATAGAATTTAAATTGCTAA | |
| Inhba_NM_ | UUUGACCUGUCUAAUCCU | 1004 | TGCACTACGATGGTGTTTGACCTGT | 908 |
| 008380_3013 | UA | | CTAATCCTTATTTAACAAGT | |
| Inhba_NM_ | UAACCAAUGUCUGGCUAA | 1005 | CTACATGCAATTCTTTAACCAATGT | 909 |
| 008380_6066 | UG | | CTGGCTAATGTAATTAAAGT | |
| Inhba_NM_ | ACAAACAUGCCUCAGUUA | 1005 | CTTTGTGATTCCAGAACAAACATGC | 910 |
| 008380_5511 | UA | | CTCAGTTATAGTAACATGCA | |
| Inhba_NM_ | AGAUAUUGUUAACAAUUU | 1006 | TATTTTAACAATATTAGATATTGTT | 911 |
| 008380_5049 | AG | | AACAATTTAGAAAACATGAA | |
| Inhba_NM_ | UUUGUAGAAGUGCUGGUA | 1007 | TTTCTTAATATTTATTTTGTAGAAG | 912 |
| 008380_6149 | AU | | TGCTGGTAATTTTTTATTTA | |

[0071] In some embodiments, a target region of an INHBA specific siRNA comprises the nucleic acid sequence of any one of SEQ ID NOs: 817-912.

[0072] In some embodiments, an INHBA specific siRNA described herein comprises a region of complementarity to at least 8, at least 9, at least 10, at least 11, at least 12, at least 13, at least 14, at least 15, at least 16, at least 17, at least 18 at least 19, at least 20, at least 21, at least 22, at least 23, at least 24, at least 25, or more consecutive nucleotides to an INHBA target nucleic acid sequence as set forth in SEQ ID NOs: 817-912. In some embodiments, an INHBA specific siRNA described herein comprises a region of complementarity to at least 8, at least 9, at least 10, at least 11, at least 12, at least 13, at least 14, at least 15, at least 16, at least 17, at least 18 at least 19, at least 20, at least 21, at least 22, at least 23, at least 24, at least 25, or more consecutive nucleotides of to an INHBA target nucleic acid sequence as set forth in SEQ ID NOs: 817-912, except for at least 1, at least 2, at least 3, at least 4, or at least 5 mismatch within the region of complementarity to the nucleotide sequence of SEQ ID NOs: 817-912.

[0073] In some embodiments, an INHBA specific siRNA described herein comprises a region of complementarity to at least 8, at least 9, at least 10, at least 11, at least 12, at least 13, at least 14, at least 15, at least 16, at least 17, at least 18 at least 19, at least 20, at least 21, at least 22, at least 23, at least 24, at least 25, or more consecutive nucleotides to an INHBA target nucleic acid sequence as set forth in SEQ ID NOs: 849, 851, or 853. In some embodiments, an INHBA specific siRNA described herein comprises a region of complementarity to at least 8, at least 9, at least 10, at least 11, at least 12, at least 13, at least 14, at least 15, at least 16, at least 17, at least 18 at least 19, at least 20, at least 21, at least 22, at least 23, at least 24, at least 25, or more consecutive nucleotides of to an INHBA target nucleic acid sequence as set forth in SEQ ID NO: 849, 851, or 853, except for at least 1, at least 2, at least 3, at least 4, or at least 5 mismatch within the region of complementarity to the nucleotide sequence of SEQ ID NO: 849, 851, or 853.

[0074] In some embodiments, an INHBA specific siRNA may be at least 80%, at least 85%, at least 90%, at least 91%, at least 92%, at least 93%, at least 94%, at least 95%, at least 96%, at least 97%, at least 98%, at least 99% or 100% complementary to any one of SEQ ID NOs: 913-1007. In some embodiments, a complementary nucleotide sequence need not be 100% complementary to that of INHBA target sequence to be specifically hybridizable or specific for an INHBA. In some embodiments, the antisense strand of an INHBA specific siRNA is fully complementarity with all or a portion of its target sequence. In some embodiments, the antisense strand of an INHBA specific siRNA includes 1, 2, 3, or more mismatches to the target sequence. In some embodiments, an INHBA specific siRNA comprises an antisense strand comprising a nucleotide sequence that is complementary (e.g., at least 85%, at least 90%, at least 95%, at least 96%, at least 97%, at least 98%, at least 99%, or 100%) to a target RNA sequence as set forth in any one of SEQ ID NOs: 913-1007. In some embodiments, an INHBA specific siRNA comprises an antisense strand comprising a nucleic acid sequence that is complementary to at least 6, at least 7, at least 8, at least 9, at least 10, at least 11, at least 12, at least 13, at least 14, at least 15, at least 16, at least 17, at least 18, at least 19, at least 20, at least 21, at least 22, at least 23, at least 24, at least 25, or more consecutive nucleotides of the sequence as set forth in any one of SEQ ID NOs: 913-1007. In some embodiments, an INHBA specific siRNA comprises an antisense strand comprising a nucleic acid sequence that is complementary the sequence as set forth in any one of SEQ ID NOs: 913-1007.

[0075] In some embodiments, an INHBA specific siRNA may be at least 80%, at least 85%, at least 90%, at least 91%, at least 92%, at least 93%, at least 94%, at least 95%, at least 96%, at least 97%, at least 98%, at least 99% or 100% complementary to SEQ ID NO: 945, 947, or 949.

[0076] In some embodiments, a complementary nucleotide sequence need not be 100% complementary to that of INHBA target sequence to be specifically hybridizable or specific for an INHBA. In some embodiments, the antisense strand of an INHBA specific siRNA is fully complementarity with all or a portion of its target sequence. In some embodiments, the antisense strand of an INHBA specific siRNA includes 1, 2, 3, or more mismatches to the target sequence. In some embodiments, an INHBA specific siRNA comprises an antisense strand comprising a nucleotide sequence that is complementary (e.g., at least 85%, at least 90%, at least 95%, at least 96%, at least 97%, at least 98%, at least 99%, or 100%) to a target RNA sequence as set forth in any one of SEQ ID NO: 945, 947, or 949. In some embodiments, an INHBA specific siRNA comprises an antisense strand comprising a nucleic acid sequence that is complementary to at least 6, at least 7, at least 8, at least 9, at least 10, at least 11, at least 12, at least 13, at least 14, at least 15, at least 16, at least 17, at least 18, at least 19, at least 20, at least 21, at least 22, at least 23, at least 24, at least 25, or more consecutive nucleotides of the sequence as set forth in any one of SEQ ID NO: 945. In some embodiments, an INHBA specific siRNA comprises an antisense strand comprising a nucleic acid sequence that is complementary the sequence as set forth in any one of SEQ ID NO: 945, 947, 949.

[0077] Exemplary INHBA specific siRNA sequences (both antisense and sense strand) are set forth in Table 10.

TABLE 10
Exemplary human INHBA or mouse Inhba specific siRNA sequences without
mismatch

| NCBI Accession | | SEQ ID | | SEQ ID |
|---|---|---|---|---|
| No and position | Sense Strand | NO | Antisense Strand | NO |
| INHBA_XM_ | CUAUGUCAAUGGUUUA | 1104 | UAAACCAUUGACAUAGUUGUU | 1008 |
| 017012174_5785 | | | | |
| INHBA_XM_ | CCAUGUUCAACUUUAA | 1105 | UUAAAGUUGAACAUGGCCAUU | 1009 |
| 017012174_4169 | | | | |
| INHBA_XM_ | AUAUUAUCAUAUUCAA | 1106 | UUGAAUAUGAUAAUAUGGGUU | 1010 |
| 017012174_5169 | | | | |
| INHBA_XM_ | AUUGGGAACAAUUACA | 1107 | UGUAAUUGUUCCCAAUUAUUU | 1011 |
| 017012174_3792 | | | | |
| INHBA_XM_ | CCCUAUGUCAAUUUGA | 1108 | UCAAAUUGACAUAGGGCUAUU | 1012 |
| 017012174_3843 | | | | |
| INHBA_XM_ | GGAUCCAAACAUUUCA | 1109 | UGAAAUGUUUGGAUCCAACUU | 1013 |
| 017012174_2395 | | | | |
| INHBA_XM_ | AGAUAACAGUUUGAUA | 1110 | UAUCAAACUGUUAUCUCUUUU | 1014 |
| 017012174_5857 | | | | |
| INHBA_XM_ | CCAUAUUAUCAUAUUA | 1111 | UAAUAUGAUAAUAUGGGUCUU | 1015 |
| 017012174_5167 | | | | |
| INHBA_XM_ | GAUUCUUAGUAGUAUA | 1112 | UAUACUACUAAGAAUCCCAUU | 1016 |
| 017012174_4722 | | | | |
| INHBA_XM_ | CCUAUGUCAAUUUGUA | 1113 | UACAAAUUGACAUAGGGCUUU | 1017 |
| 017012174_3844 | | | | |
| INHBA_XM_ | UUAUCAAACACCCACA | 1114 | UGUGGGUGUUUGAUAACCCUU | 1018 |
| 017012174_4519 | | | | |
| INHBA_XM_ | ACAAUUACAUUAAUUA | 1115 | UAAUUAAUGUAAUUGUUCCUU | 1019 |
| 017012174_3799 | | | | |
| INHBA_XM_ | AUAAUUGGGAACAAUA | 1116 | UAUUGUUCCCAAUUAUUAGUU | 1020 |
| 017012174_3789 | | | | |
| INHBA_XM_ | GUAGAACAAAUACUUA | 1117 | UAAGUAUUUGUUCUACCUUUU | 1021 |
| 017012174_5059 | | | | |
| INHBA_XM_ | CAGAAGUUAUUUAUUA | 1118 | UAAUAAAUAACUUCUGCUAUU | 1022 |
| 017012174_5892 | | | | |
| INHBA_XM_ | GCACUUCAGGCUGUCA | 1119 | UGACAGCCUGAAGUGCUUAUU | 1023 |
| 017012174_2977 | | | | |
| INHBA_XM_ | ACAUAUGGGAUUCUUA | 1120 | UAAGAAUCCCAUAUGUUAUUU | 1024 |
| 017012174_4714 | | | | |
| INHBA_XM_ | CAACCUAAUAGGUUUA | 1121 | UAAACCUAUUAGGUUGCAUUU | 1025 |
| 017012174_2262 | | | | |
| INHBA_XM_ | ACAUGUCUCAGCUAUA | 1122 | UAUAGCUGAGACAUGUGGUUU | 1026 |
| 017012174_5419 | | | | |
| INHBA_XM_ | GAAAGAAUGAAAGAUA | 1123 | UAUCUUUCAUUCUUUCCAUUU | 1027 |
| 017012174_2188 | | | | |
| INHBA_XM_ | GCAGAAAUGAAUGAAA | 1124 | UUUCAUUCAUUUCUGCCCUUU | 1028 |
| 017012174_556 | | | | |
| INHBA_XM_ | CCAUGUCCAUGUUGUA | 1125 | UACAACAUGGACAUGGGUCUU | 1029 |
| 017012174_1418 | | | | |
| INHBA_XM_ | AUAGUAACAUGUAUUA | 1126 | UAAUACAUGUUACUAUUAAUU | 1030 |
| 017012174_4878 | | | | |
| INHBA_XM_ | CUUUGAAAUAGAAGUA | 1127 | UACUUCUAUUUCAAAGCCAUU | 1031 |
| 017012174_4562 | | | | |
| INHBA_XM_ | AAGAGAUAACAGUUUA | 1128 | UAAACUGUUAUCUCUUUAAUU | 1032 |
| 017012174_5854 | | | | |
| INHBA_XM_ | CAAUGGGUUGAUAUUA | 1129 | UAAUAUCAACCCAUUGUCAUU | 1033 |
| 017012174_5535 | | | | |
| INHBA_XM_ | UAGUUGUACACUGUUA | 113 | UAACAGUGUACAACUACUGUU | 1034 |
| 017012174_2839 | | 0 | | |
| INHBA_XM_ | UUAUAGCAGAAGUUAA | 1131 | UUAACUUCUGCUAUAAACAUU | 1035 |
| 017012174_5886 | | | | |
| INHBA_XM_ | GCAAGAGUAGAUGGCA | 1132 | UGCCAUCUACUCUUGCCUUUU | 1036 |
| 017012174_4155 | | | | |
| INHBA_XM_ | GCAUAUGCAUAUCUGA | 1133 | UCAGAUAUGCAUAUGCACAUU | 1037 |
| 017012174_2918 | | | | |
| INHBA_XM_ | UAAUCUGAAGCCUGUA | 1134 | UACAGGCUUCAGAUUAUCUUU | 1038 |
| 017012174_5587 | | | | |
| INHBA_XM_ | AGGUUUCUGAGUUAAA | 1135 | UUUAACUCAGAAACCUUAAUU | 1039 |
| 017012174_1579 | | | | |
| INHBA_XM_ | GAUCCAAACAUUUCUA | 1136 | UAGAAAUGUUUGGAUCCAAUU | 1040 |
| 017012174_2396 | | | | |
| INHBA_XM_ | GCAGAGAAAUGUAAUA | 1137 | UAUUACAUUUCUCUGCUUCUU | 1041 |
| 017012174_4449 | | | | |
| INHBA_XM_ | UAUUGGAAGUAAUCUA | 1138 | UAGAUUACUUCCAAUACAAUU | 1042 |
| 017012174_2320 | | | | |
| INHBA_XM_ | AUAUGCAUAUCUGUAA | 1139 | UUACAGAUAUGCAUAUGCAUU | 1043 |
| 017012174_2920 | | | | |
| INHBA_XM_ | AUUGGAAGUAAUCUGA | 1140 | UCAGAUUACUUCCAAUACAUU | 1044 |
| 017012174_2321 | | | | |
| INHBA_XM_ | GGCAAAUACACUUACA | 1141 | UGUAAGUGUAUUUGCCCAGUU | 1045 |
| 017012174_3999 | | | | |
| INHBA_XM_ | CAAUCUUAGAAGCUCA | 1142 | UGAGCUUCUAAGAUUGGUGUU | 1046 |
| 017012174_4833 | | | | |
| INHBA_XM_ | ACUAUGUCAAUGGUUA | 1143 | UAACCAUUGACAUAGUUGAUU | 1047 |
| 017012174_5784 | | | | |
| INHBA_XM_ | UUUCUUAAUAUUUAUA | 1144 | UAUAAAUAUUAAGAAACCAUU | 1048 |
| 017012174_5797 | | | | |
| INHBA_XM_ | CCAAUUUCAUAUUUAA | 1145 | UUAAAUAUGAAAUUGGUUGUU | 1049 |
| 017012174_4988 | | | | |
| INHBA_XM_ | CCAAUGUCUGUUUGGA | 1146 | UCCAAACAGACAUUGGUUAUU | 1050 |
| 017012174_5728 | | | | |
| INHBA_XM_ | UUAAAUCAGAAGCUUA | 1147 | UAAGCUUCUGAUUUAAGAUUU | 1051 |
| 017012174_3297 | | | | |
| INHBA_XM_ | UCACUGAGAAGCUGUA | 1148 | UACAGCUUCUCAGUGAUACUU | 1052 |
| 017012174_5341 | | | | |
| INHBA_XM_ | GAAGGAUAGGCUAUAA | 1149 | UUAUAGCCUAUCCUUCUUAUU | 1053 |
| 017012174_3048 | | | | |
| INHBA_XM_ | CCAAGUUACAUUUCGA | 1150 | UCGAAAUGUAACUUGGUAUUU | 1054 |
| 017012174_2219 | | | | |
| INHBA_XM_ | GCAGAAGUUAUUUAUA | 1151 | UAUAAAUAACUUCUGCUAUUU | 1055 |
| 017012174_5891 | | | | |
| Inhba_NM_ | CUAUGUCAAUGGUUUA | 1152 | UAAACCAUUGACAUAGUUGUU | 1056 |
| 0083806118 | | | | |
| Inhba_NM_008380_ | ACAAUAUUAGAUAUUA | 1153 | UAAUAUCUAAUAUUGUUAAUU | 1057 |
| 5037 | | | | |
| Inhba_NM_008380_ | GAUUCAAACAUUUCUA | 1154 | UAGAAAUGUUUGAAUCCAAUU | 1058 |
| 2941 | | | | |
| Inhba_NM_008380_ | GGAUUCAAACAUUUCA | 1155 | UGAAAUGUUUGAAUCCAACUU | 1059 |
| 2940 | | | | |
| Inhba_NM_008380_ | UCAGUUAUUCAUUUAA | 1156 | UUAAAUGAAUAACUGAUUAUU | 1060 |
| 4144 | | | | |
| Inhba_NM_008380_ | AUAGAAUUUAAAUUGA | 1157 | UCAAUUUAAAUUCUAUUGCUU | 1061 |
| 5011 | | | | |
| Inhba_NM_008380_ | AUAAUUAUAAUUAUUA | 1158 | UAAUAAUUAUAAUUAUAAUUU | 1062 |
| 3138 | | | | |
| Inhba_NM_008380_ | CAACCUAAUAGGUUUA | 1159 | UAAACCUAUUAGGUUGCAUUU | 1063 |
| 2807 | | | | |
| Inhba_NM_008380_ | GCACUUCAGGCUGUCA | 1160 | UGACAGCCUGAAGUGCUUAUU | 1064 |
| 3507 | | | | |
| Inhba_NM_008380_ | CCCUCUGAACUGUUUA | 1161 | UAAACAGUUCAGAGGGCGCUU | 1065 |
| 4669 | | | | |
| Inhba_NM_008380_ | CAAUAUUAGAUAUUGA | 1162 | UCAAUAUCUAAUAUUGUUAUU | 1066 |
| 5038 | | | | |
| Inhba_NM_008380_ | AGAGAUAACGGUUGGA | 1163 | UCCAACCGUUAUCUCUUUAUU | 1067 |
| 6187 | | | | |
| Inhba_NM_008380_ | GCAUUAAGUCAGUCCA | 1164 | UGGACUGACUUAAUGCUAAUU | 1068 |
| 4287 | | | | |
| Inhba_NM_008380_ | UUAUUCAUUUACAUAA | 1165 | UUAUGUAAAUGAAUAACUGUU | 1069 |
| 4148 | | | | |
| Inhba_NM_008380_ | AUAGAUUAAAGUCAUA | 1166 | UAUGACUUUAAUCUAUGGAUU | 1070 |
| 4302 | | | | |
| Inhba_NM_008380_ | AAGUGAAUCAUUUCUA | 1167 | UAGAAAUGAUUCACUUUAUUU | 1071 |
| 5824 | | | | |
| Inhba_NM_008380_ | UUGCAAUAGAAUUUAA | 1168 | UUAAAUUCUAUUGCAAGGCUU | 1072 |
| 5006 | | | | |
| Inhba_NM_008380_ | GUUGUACAAAUCUCUA | 1169 | UAGAGAUUUGUACAACUCCUU | 1073 |
| 3981 | | | | |
| Inhba_NM_008380_ | ACAAUGGUUGAUAUUA | 1170 | UAAUAUCAACCAUUGUCAAUU | 1074 |
| 5900 | | | | |
| Inhba_NM_008380_ | GCAGAAGUUAUUUAUA | 1171 | UAUAAAUAACUUCUGCUAUUU | 1075 |
| 6223 | | | | |
| Inhba_NM_008380_ | UCAAUAUACCUUAUCA | 1172 | UGAUAAGGUAUAUUGACGGUU | 1076 |
| 4413 | | | | |
| Inhba_NM_008380_ | ACUUGUUUGAAGUUUA | 1173 | UAAACUUCAAACAAGUCCGUU | 1077 |
| 4191 | | | | |
| Inhba_NM_008380_ | AAUGUAAUUAAAGUUA | 1174 | UAACUUUAAUUACAUUAGCUU | 1078 |
| 6078 | | | | |
| Inhba_NM_008380_ | CUAUAUUAUUAUUUAA | 1175 | UUAAAUAAUAAUAUAGCUGUU | 1079 |
| 5797 | | | | |
| Inhba_NM_008380_ | UAAGAAAUGAAUUAUA | 1176 | UAUAAUUCAUUUCUUAUGCUU | 1080 |
| 4535 | | | | |
| Inhba_NM_008380_ | GUAGUGUACACUGUUA | 1177 | UAACAGUGUACACUACUGUUU | 1081 |
| 3372 | | | | |
| Inhba_NM_008380_ | AUUAUAAUUAUUAUUA | 1178 | UAAUAAUAAUUAUAAUUAUUU | 1082 |
| 3141 | | | | |
| Inhba_NM_008380_ | ACAAAUCUCUAAUAUA | 1179 | UAUAUUAGAGAUUUGUACAUU | 1083 |
| 3986 | | | | |
| Inhba_NM_008380_ | AUAUGCAUAUCUGUAA | 1180 | UUACAGAUAUGCAUAUGCAUU | 1084 |
| 3450 | | | | |
| Inhba_NM_008380_ | ACUUAUAUUUAUUAUA | 1181 | UAUAAUAAAUAUAAGUUGAUU | 1085 |
| 3810 | | | | |
| Inhba_NM_008380_ | CAAUGCCCGAUAGCUA | 1182 | UAGCUAUCGGGCAUUGCUGUU | 1086 |
| 6318 | | | | |
| Inhba_NM_008380_ | ACUAUGUCAAUGGUUA | 1183 | UAACCAUUGACAUAGUUGAUU | 1087 |
| 6117 | | | | |
| Inhba_NM_008380_ | UUUCUUAAUAUUUAUA | 1184 | UAUAAAUAUUAAGAAACCAUU | 1088 |
| 6130 | | | | |
| Inhba_NM_008380_ | GAAGAGCAGGAUUUAA | 1185 | UUAAAUCCUGCUCUUCCCAUU | 1089 |
| 4771 | | | | |
| Inhba_NM_008380_ | CCAACCUUAAGUCAUA | 1186 | UAUGACUUAAGGUUGGCAAUU | 1090 |
| 1767 | | | | |
| Inhba_NM_008380_ | CAUUGACAAUGGUUGA | 1187 | UCAACCAUUGUCAAUGCACUU | 1091 |
| 5895 | | | | |
| Inhba_NM_008380_ | AUGUAAUUAAAGUUGA | 1188 | UCAACUUUAAUUACAUUAGUU | 1092 |
| 6079 | | | | |
| Inhba_NM_008380_ | AGAAGGAUAAGUGAUA | 1189 | UAUCACUUAUCCUUCUUAAUU | 1093 |
| 3578 | | | | |
| Inhba_NM_008380_ | AUGUGACACUAUCUCA | 1190 | UGAGAUAGUGUCACAUAGAUU | 1094 |
| 2405 | | | | |
| Inhba_NM_008380_ | CCAAGUUACAUUUCGA | 1191 | UCGAAAUGUAACUUGGUAUUU | 1095 |
| 2764 | | | | |
| Inhba_NM_008380_ | AAAGGAAUAUGUUUGA | 1192 | UCAAACAUAUUCCUUUCAAUU | 1096 |
| 2915 | | | | |
| Inhba_NM_008380_ | UUAUAGCAGAAGUUAA | 1193 | UUAACUUCUGCUAUAAACAUU | 1097 |
| 6218 | | | | |
| Inhba_NM_008380_ | CCUUGCAAUAGAAUUA | 1194 | UAAUUCUAUUGCAAGGCCAUU | 1098 |
| 5004 | | | | |
| Inhba_NM_008380_ | ACCUGUCUAAUCCUUA | 1195 | UAAGGAUUAGACAGGUCAAUU | 1099 |
| 3013 | | | | |
| Inhba_NM_008380_ | CAAUGUCUGGCUAAUA | 1196 | UAUUAGCCAGACAUUGGUUUU | 1100 |
| 6066 | | | | |
| Inhba_NM_008380_ | ACAUGCCUCAGUUAUA | 1197 | UAUAACUGAGGCAUGUUUGUU | 1101 |
| 5511 | | | | |
| Inhba_NM_008380_ | AUUGUUAACAAUUUAA | 1198 | UUAAAUUGUUAACAAUAUCUU | 1102 |
| 5049 | | | | |
| Inhba_NM_008380_ | UAGAAGUGCUGGUAAA | 1199 | UUUACCAGCACUUCUACAAUU | 1103 |
| 6149 | | | | |

[0078] In some embodiments, an INHBA specific siRNA comprises an antisense strand that comprises at least 15 consecutive nucleosides of (e.g., at least 15, at least 16, at least 17, at least 18, at least 19, or at least 20) the sequence of any one of SEQ ID NOs: 1008-1103. In some embodiments, an INHBA specific siRNA further comprises a sense strand that comprises at least 15 consecutive nucleosides (e.g., at least 15, at least 16, at least 17, at least 18, at least 19, or at least 20) complementary to the sequence of any one of SEQ ID NOs: 1008-1103. In some embodiments, an INHBA specific siRNA further comprises a sense strand that comprises at least 15 consecutive nucleosides of (e.g., at least 15, at least 16, at least 17, at least 18, at least 19, or at least 20) the sequence of any one of SEQ ID NOs: 1104-1199.

[0079] In some embodiments, an INHBA specific siRNA comprises an antisense strand that comprises at least 15 consecutive nucleosides of (e.g., at least 15, at least 16, at least 17, at least 18, at least 19, or at least 20) the sequence of SEQ ID NOs: 1040, 1042, or 1044. In some embodiments, an INHBA specific siRNA further comprises a sense strand that comprises at least 15 consecutive nucleosides (e.g., at least 15, at least 16, at least 17, at least 18, at least 19, or at least 20) complementary to the sequence of any one of SEQ ID NOs: 1040, 1042, or 1044. In some embodiments, an INHBA specific siRNA further comprises a sense strand that comprises at least 15 consecutive nucleosides of (e.g., at least 15, at least 16, at least 17, at least 18, at least 19, or at least 20) the sequence of any one of SEQ ID NOs: 1136, 1138, or 1144.

[0080] In some embodiments, an INHBA specific siRNA comprises an antisense strand that is at least 80% (e.g., at least 85%, at least 90%, at least 95%, at least 96%, at least 97%, at least 98%, at least 99%, or 100%) to the sequence of any one of SEQ ID NOs: 1008-1103. In some embodiments, an INHBA specific siRNA further comprises a sense strand that comprises a complementary to a sequence at least 80% (e.g., at least 85%, at least 90%, at least 95%, at least 96%, at least 97%, at least 98%, at least 99%, or 100%) identical to the sequence of any one of SEQ ID NOs: 1008-1103. In some embodiments, an INHBA specific siRNA further comprises a sense strand that is at least 80% (e.g., at least 85%, at least 90%, at least 95%, at least 96%, at least 97%, at least 98%, at least 99%, or 100%) identical to the sequence of any one of SEQ ID NOs: 1104-1199.

[0081] In some embodiments, an INHBA specific siRNA described herein comprises at least one nucleoside modified at the 2′ position of the sugar. In some embodiments, an INHBA specific siRNA comprises at least one 2′-modified nucleoside. In some embodiments, all of the nucleosides in the oligonucleotide are 2′-modified nucleosides.

[0082] In some embodiments, an INHBA specific siRNA described herein comprises one or more non-bicyclic 2′-modified nucleosides, e.g., 2′-deoxy, 2′-fluoro (2′-F), 2′-O-methyl (2′-O-Me), 2′-O-methoxyethyl (2′-MOE), 2′-O-aminopropyl (2′-O-AP), 2′-O-dimethylaminoethyl (2′-O-DMAOE), 2′-O-dimethylaminopropyl (2′-O-DMAP), 2′-O-dimethylaminoethyloxyethyl (2′-O-DMAEOE), or 2′-O—N-methylacetamido (2′-O-NMA) modified nucleoside. In some embodiments, an INHBA specific siRNA comprises one or more 2′-O-methoxyethyl (2′-MOE) modified nucleoside and/or one or more 2′-fluoro (2′-F) modified nucleoside.

[0083] In some embodiments, an INHBA specific siRNA comprises one or more modified one or more modified internucleotide linkages. In some embodiments, the internucleotide linkage is a phosphorothioate linkage. In some embodiments, an INHBA specific siRNA further comprises a cholesterol molecule. In some embodiments, an INHBA specific siRNA is conjugated to the cholesterol by a TEG linker. In some embodiments, an INHBA specific siRNA is conjugated to a docosanoic acid (DCA). In some embodiments, the DCA is conjugated to the isolated nucleic acid via a cleavable linker. Exemplary an INHBA specific siRNA with chemical modifications are set forth in Table 3.

TABLE 3
Modified INHBA specific siRNA without mismatch

| NCBI | | SEQ |
|---|---|---|
| Accession No | | ID |
| and position | | NO |
| | Sense Strand | |
| INHBA_XM_017012174_5785 | (mC)#(mU)#(mA)(fU)(mG)(fU)(mC)(fA)(mA)(fU)(mG)(mG)(mU)(fU)#(mU)#(mA)-TegChol | 93 |
| INHBA_XM_017012174_4169 | (mC)#(mC)#(mA)(fU)(mG)(fU)(mU)(fC)(mA)(fA)(mC)(mU)(mU)(fU)#(mA)#(mA)-TegChol | 94 |
| INHBA_XM_017012174_5169 | (mA)#(mU)#(mA)(fU)(mU)(fA)(mU)(fC)(mA)(fU)(mA)(mU)(mU)(fC)#(mA)#(mA)-TegChol | 95 |
| INHBA_XM_017012174_3792 | (mA)#(mU)#(mU)(fG)(mG)(fG)(mA)(fA)(mC)(fA)(mA)(mU)(mU)(fA)#(mC)#(mA)-TegChol | 96 |
| INHBA_XM_017012174_3843 | (mC)#(mC)#(mC)(fU)(mA)(fU)(mG)(fU)(mC)(fA)(mA)(mU)(mU)(fU)#(mG)#(mA)-TegChol | 97 |
| INHBA_XM_017012174_2395 | (mG)#(mG)#(mA)(fU)(mC)(fC)(mA)(fA)(mA)(fC)(mA)(mU)(mU)(fU)#(mC)#(mA)-TegChol | 98 |
| INHBA_XM_017012174_5857 | (mA)#(mG)#(mA)(fU)(mA)(fA)(mC)(fA)(mG)(fU)(mU)(mU)(mG)(fA)#(mU)#(mA)-TegChol | 99 |
| INHBA_XM_017012174_5167 | (mC)#(mC)#(mA)(fU)(mA)(fU)(mU)(fA)(mU)(fC)(mA)(mU)(mA)(fU)#(mU)#(mA)-TegChol | 100 |
| INHBA_XM_017012174_4722 | (mG)#(mA)#(mU)(fU)(mC)(fU)(mU)(fA)(mG)(fU)(mA)(mG)(mU)(fA)#(mU)#(mA)-TegChol | 101 |
| INHBA_XM_017012174_3844 | (mC)#(mC)#(mU)(fA)(mU)(fG)(mU)(fC)(mA)(fA)(mU)(mU)(mU)(fG)#(mU)#(mA)-TegChol | 102 |
| INHBA_XM_017012174_4519 | (mU)#(mU)#(mA)(fU)(mC)(fA)(mA)(fA)(mC)(fA)(mC)(mC)(mC)(fA)#(mC)#(mA)-TegChol | 103 |
| INHBA_XM_017012174_3799 | (mA)#(mC)#(mA)(fA)(mU)(fU)(mA)(fC)(mA)(fU)(mU)(mA)(mA)(fU)#(mU)#(mA)-TegChol | 104 |
| INHBA_XM_017012174_3789 | (mA)#(mU)#(mA)(fA)(mU)(fU)(mG)(fG)(mG)(fA)(mA)(mC)(mA)(fA)#(mU)#(mA)-TegChol | 105 |
| INHBA_XM_017012174_5059 | (mG)#(mU)#(mA)(fG)(mA)(fA)(mC)(fA)(mA)(fA)(mU)(mA)(mC)(fU)#(mU)#(mA)-TegChol | 106 |
| INHBA_XM_017012174_5892 | (mC)#(mA)#(mG)(fA)(mA)(fG)(mU)(fU)(mA)(fU)(mU)(mU)(mA)(fU)#(mU)#(mA)-TegChol | 107 |
| INHBA_XM_017012174_2977 | (mG)#(mC)#(mA)(fC)(mU)(fU)(mC)(fA)(mG)(fG)(mC)(mU)(mG)(fU)#(mC)#(mA)-TegChol | 108 |
| INHBA_XM_017012174_4714 | (mA)#(mC)#(mA)(fU)(mA)(fU)(mG)(fG)(mG)(fA)(mU)(mU)(mC)(fU)#(mU)#(mA)-TegChol | 109 |
| INHBA_XM_017012174_2262 | (mC)#(mA)#(mA)(fC)(mC)(fU)(mA)(fA)(mU)(fA)(mG)(mG)(mU)(fU)#(mU)#(mA)-TegChol | 110 |
| INHBA_XM_017012174_5419 | (mA)#(mC)#(mA)(fU)(mG)(fU)(mC)(fU)(mC)(fA)(mG)(mC)(mU)(fA)#(mU)#(mA)-TegChol | 111 |
| INHBA_XM_017012174_2188 | (mG)#(mA)#(mA)(fA)(mG)(fA)(mA)(fU)(mG)(fA)(mA)(mA)(mG)(fA)#(mU)#(mA)-TegChol | 112 |
| INHBA_XM_017012174_556 | (mG)#(mC)#(mA)(fG)(mA)(fA)(mA)(fU)(mG)(fA)(mA)(mU)(mG)(fA)#(mA)#(mA)-TegChol | 113 |
| INHBA_XM_017012174_1418 | (mC)#(mC)#(mA)(fU)(mG)(fU)(mC)(fC)(mA)(fU)(mG)(mU)(mU)(fG)#(mU)#(mA)-TegChol | 114 |
| INHBA_XM_017012174_4878 | (mA)#(mU)#(mA)(fG)(mU)(fA)(mA)(fC)(mA)(fU)(mG)(mU)(mA)(fU)#(mU)#(mA)-TegChol | 115 |
| INHBA_XM_017012174_4562 | (mC)#(mU)#(mU)(fU)(mG)(fA)(mA)(fA)(mU)(fA)(mG)(mA)(mA)(fG)#(mU)#(mA)-TegChol | 116 |
| INHBA_XM_017012174_5854 | (mA)#(mA)#(mG)(fA)(mG)(fA)(mU)(fA)(mA)(fC)(mA)(mG)(mU)(fU)#(mU)#(mA)-TegChol | 117 |
| INHBA_XM_017012174_5535 | (mC)#(mA)#(mA)(fU)(mG)(fG)(mG)(fU)(mU)(fG)(mA)(mU)(mA)(fU)#(mU)#(mA)-TegChol | 118 |
| INHBA_XM_017012174_2839 | (mU)#(mA)#(mG)(fU)(mU)(fG)(mU)(fA)(mC)(fA)(mC)(mU)(mG)(fU)#(mU)#(mA)-TegChol | 119 |
| INHBA_XM_017012174_5886 | (mU)#(mU)#(mA)(fU)(mA)(fG)(mC)(fA)(mG)(fA)(mA)(mG)(mU)(fU)#(mA)#(mA)-TegChol | 120 |
| INHBA_XM_017012174_4155 | (mG)#(mC)#(mA)(fA)(mG)(fA)(mG)(fU)(mA)(fG)(mA)(mU)(mG)(fG)#(mC)#(mA)-TegChol | 121 |
| INHBA_XM_017012174_2918 | (mG)#(mC)#(mA)(fU)(mA)(fU)(mG)(fC)(mA)(fU)(mA)(mU)(mC)(fU)#(mG)#(mA)-TegChol | 122 |
| INHBA_XM_017012174_5587 | (mU)#(mA)#(mA)(fU)(mC)(fU)(mG)(fA)(mA)(fG)(mC)(mC)(mU)(fG)#(mU)#(mA)-TegChol | 123 |
| INHBA_XM_017012174_1579 | (mA)#(mG)#(mG)(fU)(mU)(fU)(mC)(fU)(mG)(fA)(mG)(mU)(mU)(fA)#(mA)#(mA)-TegChol | 124 |
| INHBA_XM_017012174_2396 | (mG)#(mA)#(mU)(fC)(mC)(fA)(mA)(fA)(mC)(fA)(mU)(mU)(mU)(fC)#(mU)#(mA)-TegChol | 125 |
| INHBA_XM_017012174_4449 | (mG)#(mC)#(mA)(fG)(mA)(fG)(mA)(fA)(mA)(fU)(mG)(mU)(mA)(fA)#(mU)#(mA)-TegChol | 126 |
| INHBA_XM_017012174_2320 | (mU)#(mA)#(mU)(fU)(mG)(fG)(mA)(fA)(mG)(fU)(mA)(mA)(mU)(fC)#(mU)#(mA)-TegChol | 127 |
| INHBA_XM_017012174_2920 | (mA)#(mU)#(mA)(fU)(mG)(fC)(mA)(fU)(mA)(fU)(mC)(mU)(mG)(fU)#(mA)#(mA)-TegChol | 128 |
| INHBA_XM_017012174_2321 | (mA)#(mU)#(mU)(fG)(mG)(fA)(mA)(fG)(mU)(fA)(mA)(mU)(mC)(fU)#(mG)#(mA)-TegChol | 129 |
| INHBA_XM_017012174_3999 | (mG)#(mG)#(mC)(fA)(mA)(fA)(mU)(fA)(mC)(fA)(mC)(mU)(mU)(fA)#(mC)#(mA)-TegChol | 130 |
| INHBA_XM_017012174_4833 | (mC)#(mA)#(mA)(fU)(mC)(fU)(mU)(fA)(mG)(fA)(mA)(mG)(mC)(fU)#(mC)#(mA)-TegChol | 131 |
| INHBA_XM_017012174_5784 | (mA)#(mC)#(mU)(fA)(mU)(fG)(mU)(fC)(mA)(fA)(mU)(mG)(mG)(fU)#(mU)#(mA)-TegChol | 132 |
| INHBA_XM_017012174_5797 | (mU)#(mU)#(mU)(fC)(mU)(fU)(mA)(fA)(mU)(fA)(mU)(mU)(mU)(fA)#(mU)#(mA)-TegChol | 133 |
| INHBA_XM_017012174_4988 | (mC)#(mC)#(mA)(fA)(mU)(fU)(mU)(fC)(mA)(fU)(mA)(mU)(mU)(fU)#(mA)#(mA)-TegChol | 134 |
| INHBA_XM_017012174_5728 | (mC)#(mC)#(mA)(fA)(mU)(fG)(mU)(fC)(mU)(fG)(mU)(mU)(mU)(fG)#(mG)#(mA)-TegChol | 135 |
| INHBA_XM_017012174_3297 | (mU)#(mU)#(mA)(fA)(mA)(fU)(mC)(fA)(mG)(fA)(mA)(mG)(mC)(fU)#(mU)#(mA)-TegChol | 136 |
| INHBA_XM_017012174_5341 | (mU)#(mC)#(mA)(fC)(mU)(fG)(mA)(fG)(mA)(fA)(mG)(mC)(mU)(fG)#(mU)#(mA)-TegChol | 137 |
| INHBA_XM_017012174_3048 | (mG)#(mA)#(mA)(fG)(mG)(fA)(mU)(fA)(mG)(fG)(mC)(mU)(mA)(fU)#(mA)#(mA)-TegChol | 138 |
| INHBA_XM_017012174_2219 | (mC)#(mC)#(mA)(fA)(mG)(fU)(mU)(fA)(mC)(fA)(mU)(mU)(mU)(fC)#(mG)#(mA)-TegChol | 139 |
| INHBA_XM_017012174_5891 | (mG)#(mC)#(mA)(fG)(mA)(fA)(mG)(fU)(mU)(fA)(mU)(mU)(mU)(fA)#(mU)#(mA)-TegChol | 140 |
| Inhba_NM_008380_6118 | (mC)#(mU)#(mA)(fU)(mG)(fU)(mC)(fA)(mA)(fU)(mG)(mG)(mU)(fU)#(mU)#(mA)-TegChol | 141 |
| Inhba_NM_008380_5037 | (mA)#(mC)#(mA)(fA)(mU)(fA)(mU)(fU)(mA)(fG)(mA)(mU)(mA)(fU)#(mU)#(mA)-TegChol | 142 |
| Inhba_NM_008380_2941 | (mG)#(mA)#(mU)(fU)(mC)(fA)(mA)(fA)(mC)(fA)(mU)(mU)(mU)(fC)#(mU)#(mA)-TegChol | 143 |
| Inhba_NM_008380_2940 | (mG)#(mG)#(mA)(fU)(mU)(fC)(mA)(fA)(mA)(fC)(mA)(mU)(mU)(fU)#(mC)#(mA)-TegChol | 144 |
| Inhba_NM_008380_4144 | (mU)#(mC)#(mA)(fG)(mU)(fU)(mA)(fU)(mU)(fC)(mA)(mU)(mU)(fU)#(mA)#(mA)-TegChol | 145 |
| Inhba_NM_008380_5011 | (mA)#(mU)#(mA)(fG)(mA)(fA)(mU)(fU)(mU)(fA)(mA)(mA)(mU)(fU)#(mG)#(mA)-TegChol | 146 |
| Inhba_NM_008380_3138 | (mA)#(mU)#(mA)(fA)(mU)(fU)(mA)(fU)(mA)(fA)(mU)(mU)(mA)(fU)#(mU)#(mA)-TegChol | 147 |
| Inhba_NM_008380_2807 | (mC)#(mA)#(mA)(fC)(mC)(fU)(mA)(fA)(mU)(fA)(mG)(mG)(mU)(fU)#(mU)#(mA)-TegChol | 148 |
| Inhba_NM_008380_3507 | (mG)#(mC)#(mA)(fC)(mU)(fU)(mC)(fA)(mG)(fG)(mC)(mU)(mG)(fU)#(mC)#(mA)-TegChol | 149 |
| Inhba_NM_008380_4669 | (mC)#(mC)#(mC)(fU)(mC)(fU)(mG)(fA)(mA)(fC)(mU)(mG)(mU)(fU)#(mU)#(mA)-TegChol | 150 |
| Inhba_NM_008380_5038 | (mC)#(mA)#(mA)(fU)(mA)(fU)(mU)(fA)(mG)(fA)(mU)(mA)(mU)(fU)#(mG)#(mA)-TegChol | 151 |
| Inhba_NM_008380_6187 | (mA)#(mG)#(mA)(fG)(mA)(fU)(mA)(fA)(mC)(fG)(mG)(mU)(mU)(fG)#(mG)#(mA)-TegChol | 152 |
| Inhba_NM_008380_4287 | (mG)#(mC)#(mA)(fU)(mU)(fA)(mA)(fG)(mU)(fC)(mA)(mG)(mU)(fC)#(mC)#(mA)-TegChol | 153 |
| Inhba_NM_008380_4148 | (mU)#(mU)#(mA)(fU)(mU)(fC)(mA)(fU)(mU)(fU)(mA)(mC)(mA)(fU)#(mA)#(mA)-TegChol | 154 |
| Inhba_NM_008380_4302 | (mA)#(mU)#(mA)(fG)(mA)(fU)(mU)(fA)(mA)(fA)(mG)(mU)(mC)(fA)#(mU)#(mA)-TegChol | 155 |
| Inhba_NM_008380_5824 | (mA)#(mA)#(mG)(fU)(mG)(fA)(mA)(fU)(mC)(fA)(mU)(mU)(mU)(fC)#(mU)#(mA)-TegChol | 156 |
| Inhba_NM_008380_5006 | (mU)#(mU)#(mG)(fC)(mA)(fA)(mU)(fA)(mG)(fA)(mA)(mU)(mU)(fU)#(mA)#(mA)-TegChol | 157 |
| Inhba_NM_008380_3981 | (mG)#(mU)#(mU)(fG)(mU)(fA)(mC)(fA)(mA)(fA)(mU)(mC)(mU)(fC)#(mU)#(mA)-TegChol | 158 |
| Inhba_NM_008380_5900 | (mA)#(mC)#(mA)(fA)(mU)(fG)(mG)(fU)(mU)(fG)(mA)(mU)(mA)(fU)#(mU)#(mA)-TegChol | 159 |
| Inhba_NM_008380_6223 | (mG)#(mC)#(mA)(fG)(mA)(fA)(mG)(fU)(mU)(fA)(mU)(mU)(mU)(fA)#(mU)#(mA)-TegChol | 160 |
| Inhba_NM_008380_4413 | (mU)#(mC)#(mA)(fA)(mU)(fA)(mU)(fA)(mC)(fC)(mU)(mU)(mA)(fU)#(mC)#(mA)-TegChol | 161 |
| Inhba_NM_008380_4191 | (mA)#(mC)#(mU)(fU)(mG)(fU)(mU)(fU)(mG)(fA)(mA)(mG)(mU)(fU)#(mU)#(mA)-TegChol | 162 |
| Inhba_NM_008380_6078 | (mA)#(mA)#(mU)(fG)(mU)(fA)(mA)(fU)(mU)(fA)(mA)(mA)(mG)(fU)#(mU)#(mA)-TegChol | 163 |
| Inhba_NM_008380_5797 | (mC)#(mU)#(mA)(fU)(mA)(fU)(mU)(fA)(mU)(fU)(mA)(mU)(mU)(fU)#(mA)#(mA)-TegChol | 164 |
| Inhba_NM_008380_4535 | (mU)#(mA)#(mA)(fG)(mA)(fA)(mA)(fU)(mG)(fA)(mA)(mU)(mU)(fA)#(mU)#(mA)-TegChol | 165 |
| Inhba_NM_008380_3372 | (mG)#(mU)#(mA)(fG)(mU)(fG)(mU)(fA)(mC)(fA)(mC)(mU)(mG)(fU)#(mU)#(mA)-TegChol | 166 |
| Inhba_NM_008380_3141 | (mA)#(mU)#(mU)(fA)(mU)(fA)(mA)(fU)(mU)(fA)(mU)(mU)(mA)(fU)#(mU)#(mA)-TegChol | 167 |
| Inhba_NM_008380_3986 | (mA)#(mC)#(mA)(fA)(mA)(fU)(mC)(fU)(mC)(fU)(mA)(mA)(mU)(fA)#(mU)#(mA)-TegChol | 168 |
| Inhba_NM_008380_3450 | (mA)#(mU)#(mA)(fU)(mG)(fC)(mA)(fU)(mA)(fU)(mC)(mU)(mG)(fU)#(mA)#(mA)-TegChol | 169 |
| Inhba_NM_008380_3810 | (mA)#(mC)#(mU)(fU)(mA)(fU)(mA)(fU)(mU)(fU)(mA)(mU)(mU)(fA)#(mU)#(mA)-TegChol | 170 |
| Inhba_NM_008380_6318 | (mC)#(mA)#(mA)(fU)(mG)(fC)(mC)(fC)(mG)(fA)(mU)(mA)(mG)(fC)#(mU)#(mA)-TegChol | 171 |
| Inhba_NM_008380_6117 | (mA)#(mC)#(mU)(fA)(mU)(fG)(mU)(fC)(mA)(fA)(mU)(mG)(mG)(fU)#(mU)#(mA)-TegChol | 172 |
| Inhba_NM_008380_6130 | (mU)#(mU)#(mU)(fC)(mU)(fU)(mA)(fA)(mU)(fA)(mU)(mU)(mU)(fA)#(mU)#(mA)-TegChol | 173 |
| Inhba_NM_008380_4771 | (mG)#(mA)#(mA)(fG)(mA)(fG)(mC)(fA)(mG)(fG)(mA)(mU)(mU)(fU)#(mA)#(mA)-TegChol | 174 |
| Inhba_NM_008380_1767 | (mC)#(mC)#(mA)(fA)(mC)(fC)(mU)(fU)(mA)(fA)(mG)(mU)(mC)(fA)#(mU)#(mA)-TegChol | 175 |
| Inhba_NM_008380_5895 | (mC)#(mA)#(mU)(fU)(mG)(fA)(mC)(fA)(mA)(fU)(mG)(mG)(mU)(fU)#(mG)#(mA)-TegChol | 176 |
| Inhba_NM_008380_6079 | (mA)#(mU)#(mG)(fU)(mA)(fA)(mU)(fU)(mA)(fA)(mA)(mG)(mU)(fU)#(mG)#(mA)-TegChol | 177 |
| Inhba_NM_008380_3578 | (mA)#(mG)#(mA)(fA)(mG)(fG)(mA)(fU)(mA)(fA)(mG)(mU)(mG)(fA)#(mU)#(mA)-TegChol | 178 |
| Inhba_NM_008380_2405 | (mA)#(mU)#(mG)(fU)(mG)(fA)(mC)(fA)(mC)(fU)(mA)(mU)(mC)(fU)#(mC)#(mA)-TegChol | 179 |
| Inhba_NM_008380_2764 | (mC)#(mC)#(mA)(fA)(mG)(fU)(mU)(fA)(mC)(fA)(mU)(mU)(mU)(fC)#(mG)#(mA)-TegChol | 180 |
| Inhba_NM_008380_2915 | (mA)#(mA)#(mA)(fG)(mG)(fA)(mA)(fU)(mA)(fU)(mG)(mU)(mU)(fU)#(mG)#(mA)-TegChol | 181 |
| Inhba_NM_008380_6218 | (mU)#(mU)#(mA)(fU)(mA)(fG)(mC)(fA)(mG)(fA)(mA)(mG)(mU)(fU)#(mA)#(mA)-TegChol | 182 |
| Inhba_NM_008380_5004 | (mC)#(mC)#(mU)(fU)(mG)(fC)(mA)(fA)(mU)(fA)(mG)(mA)(mA)(fU)#(mU)#(mA)-TegChol | 183 |
| Inhba_NM_008380_3013 | (mA)#(mC)#(mC)(fU)(mG)(fU)(mC)(fU)(mA)(fA)(mU)(mC)(mC)(fU)#(mU)#(mA)-TegChol | 184 |
| Inhba_NM_008380_6066 | (mC)#(mA)#(mA)(fU)(mG)(fU)(mC)(fU)(mG)(fG)(mC)(mU)(mA)(fA)#(mU)#(mA)-TegChol | 185 |
| Inhba_NM_008380_5511 | (mA)#(mC)#(mA)(fU)(mG)(fC)(mC)(fU)(mC)(fA)(mG)(mU)(mU)(fA)#(mU)#(mA)-TegChol | 186 |
| Inhba_NM_008380_5049 | (mA)#(mU)#(mU)(fG)(mU)(fU)(mA)(fA)(mC)(fA)(mA)(mU)(mU)(fU)#(mA)#(mA)-TegChol | 187 |
| Inhba_NM_008380_6149 | (mU)#(mA)#(mG)(fA)(mA)(fG)(mU)(fG)(mC)(fU)(mG)(mG)(mU)(fA)#(mA)#(mA)-TegChol | 188 |
| | AntisenseStrand | |
| INHBA_XM_017012174_5785 | P(mU)#(fA)#(mA)(fA)(fC)(fC)(mA)(fU)(mU)(fG)(mA)(fC)(mA)(fU)#(mA)#(fG)#(mU)#(mU)#(mG)#(mU)#(fU) | 189 |
| INHBA_XM_017012174_4169 | P(mU)#(fU)#(mA)(fA)(fA)(fG)(mU)(fU)(mG)(fA)(mA)(fC)(mA)(fU)#(mG)#(fG)#(mC)#(mC)#(mA)#(mU)#(fU) | 190 |
| INHBA_XM_017012174_5169 | P(mU)#(fU)#(mG)(fA)(fA)(fU)(mA)(fU)(mG)(fA)(mU)(fA)(mA)(fU)#(mA)#(fU)#(mG)#(mG)#(mG)#(mU)#(fU) | 191 |
| INHBA_XM_017012174_3792 | P(mU)#(fG)#(mU)(fA)(fA)(fU)(mU)(fG)(mU)(fU)(mC)(fC)(mC)(fA)#(mA)#(fU)#(mU)#(mA)#(mU)#(mU)#(fU) | 192 |
| INHBA_XM_017012174_3843 | P(mU)#(fC)#(mA)(fA)(fA)(fU)(mU)(fG)(mA)(fC)(mA)(fU)(mA)(fG)#(mG)#(fG)#(mC)#(mU)#(mA)#(mU)#(fU) | 193 |
| INHBA_XM_017012174_2395 | P(mU)#(fG)#(mA)(fA)(fA)(fU)(mG)(fU)(mU)(fU)(mG)(fG)(mA)(fU)#(mC)#(fC)#(mA)#(mA)#(mC)#(mU)#(fU) | 194 |
| INHBA_XM_017012174_5857 | P(mU)#(fA)#(mU)(fC)(fA)(fA)(mA)(fC)(mU)(fG)(mU)(fU)(mA)(fU)#(mC)#(fU)#(mC)#(mU)#(mU)#(mU)#(fU) | 195 |
| INHBA_XM_017012174_5167 | P(mU)#(fA)#(mA)(fU)(fA)(fU)(mG)(fA)(mU)(fA)(mA)(fU)(mA)(fU)#(mG)#(fG)#(mG)#(mU)#(mC)#(mU)#(fU) | 196 |
| INHBA_XM_017012174_4722 | P(mU)#(fA)#(mU)(fA)(fC)(fU)(mA)(fC)(mU)(fA)(mA)(fG)(mA)(fA)#(mU)#(fC)#(mC)#(mC)#(mA)#(mU)#(fU) | 197 |
| INHBA_XM_017012174_3844 | P(mU)#(fA)#(mC)(fA)(fA)(fA)(mU)(fU)(mG)(fA)(mC)(fA)(mU)(fA)#(mG)#(fG)#(mG)#(mC)#(mU)#(mU)#(fU) | 198 |
| INHBA_XM_017012174_4519 | P(mU)#(fG)#(mU)(fG)(fG)(fG)(mU)(fG)(mU)(fU)(mU)(fG)(mA)(fU)#(mA)#(fA)#(mC)#(mC)#(mC)#(mU)#(fU) | 199 |
| INHBA_XM_017012174_3799 | P(mU)#(fA)#(mA)(fU)(fU)(fA)(mA)(fU)(mG)(fU)(mA)(fA)(mU)(fU)#(mG)#(fU)#(mU)#(mC)#(mC)#(mU)#(fU) | 200 |
| INHBA_XM_017012174_3789 | P(mU)#(fA)#(mU)(fU)(fG)(fU)(mU)(fC)(mC)(fC)(mA)(fA)(mU)(fU)#(mA)#(fU)#(mU)#(mA)#(mG)#(mU)#(fU) | 201 |
| INHBA_XM_017012174_5059 | P(mU)#(fA)#(mA)(fG)(fU)(fA)(mU)(fU)(mU)(fG)(mU)(fU)(mC)(fU)#(mA)#(fC)#(mC)#(mU)#(mU)#(mU)#(fU) | 202 |
| INHBA_XM_017012174_5892 | P(mU)#(fA)#(mA)(fU)(fA)(fA)(mA)(fU)(mA)(fA)(mC)(fU)(mU)(fC)#(mU)#(fG)#(mC)#(mU)#(mA)#(mU)#(fU) | 203 |
| INHBA_XM_017012174_2977 | P(mU)#(fG)#(mA)(fC)(fA)(fG)(mC)(fC)(mU)(fG)(mA)(fA)(mG)(fU)#(mG)#(fC)#(mU)#(mU)#(mA)#(mU)#(fU) | 204 |
| INHBA_XM_017012174_4714 | P(mU)#(fA)#(mA)(fG)(fA)(fA)(mU)(fC)(mC)(fC)(mA)(fU)(mA)(fU)#(mG)#(fU)#(mU)#(mA)#(mU)#(mU)#(fU) | 205 |
| INHBA_XM_017012174_2262 | P(mU)#(fA)#(mA)(fA)(fC)(fC)(mU)(fA)(mU)(fU)(mA)(fG)(mG)(fU)#(mU)#(fG)#(mC)#(mA)#(mU)#(mU)#(fU) | 206 |
| INHBA_XM_017012174_5419 | P(mU)#(fA)#(mU)(fA)(fG)(fC)(mU)(fG)(mA)(fG)(mA)(fC)(mA)(fU)#(mG)#(fU)#(mG)#(mG)#(mU)#(mU)#(fU) | 207 |
| INHBA_XM_017012174_2188 | P(mU)#(fA)#(mU)(fC)(fU)(fU)(mU)(fC)(mA)(fU)(mU)(fC)(mU)(fU)#(mU)#(fC)#(mC)#(mA)#(mU)#(mU)#(fU) | 208 |
| INHBA_XM_017012174_556 | P(mU)#(fU)#(mU)(fC)(fA)(fU)(mU)(fC)(mA)(fU)(mU)(fU)(mC)(fU)#(mG)#(fC)#(mC)#(mC)#(mU)#(mU)#(fU) | 209 |
| INHBA_XM_017012174_1418 | P(mU)#(fA)#(mC)(fA)(fA)(fC)(mA)(fU)(mG)(fG)(mA)(fC)(mA)(fU)#(mG)#(fG)#(mG)#(mU)#(mC)#(mU)#(fU) | 210 |
| INHBA_XM_017012174_4878 | P(mU)#(fA)#(mA)(fU)(fA)(fC)(mA)(fU)(mG)(fU)(mU)(fA)(mC)(fU)#(mA)#(fU)#(mU)#(mA)#(mA)#(mU)#(fU) | 211 |
| INHBA_XM_017012174_4562 | P(mU)#(fA)#(mC)(fU)(fU)(fC)(mU)(fA)(mU)(fU)(mU)(fC)(mA)(fA)#(mA)#(fG)#(mC)#(mC)#(mA)#(mU)#(fU) | 212 |
| INHBA_XM_017012174_5854 | P(mU)#(fA)#(mA)(fA)(fC)(fU)(mG)(fU)(mU)(fA)(mU)(fC)(mU)(fC)#(mU)#(fU)#(mU)#(mA)#(mA)#(mU)#(fU) | 213 |
| INHBA_XM_017012174_5535 | P(mU)#(fA)#(mA)(fU)(fA)(fU)(mC)(fA)(mA)(fC)(mC)(fC)(mA)(fU)#(mU)#(fG)#(mU)#(mC)#(mA)#(mU)#(fU) | 214 |
| INHBA_XM_017012174_2839 | P(mU)#(fA)#(mA)(fC)(fA)(fG)(mU)(fG)(mU)(fA)(mC)(fA)(mA)(fC)#(mU)#(fA)#(mC)#(mU)#(mG)#(mU)#(fU) | 215 |
| INHBA_XM_017012174_5886 | P(mU)#(fU)#(mA)(fA)(fC)(fU)(mU)(fC)(mU)(fG)(mC)(fU)(mA)(fU)#(mA)#(fA)#(mA)#(mC)#(mA)#(mU)#(fU) | 216 |
| INHBA_XM_017012174_4155 | P(mU)#(fG)#(mC)(fC)(fA)(fU)(mC)(fU)(mA)(fC)(mU)(fC)(mU)(fU)#(mG)#(fC)#(mC)#(mU)#(mU)#(mU)#(fU) | 217 |
| INHBA_XM_017012174_2918 | P(mU)#(fC)#(mA)(fG)(fA)(fU)(mA)(fU)(mG)(fC)(mA)(fU)(mA)(fU)#(mG)#(fC)#(mA)#(mC)#(mA)#(mU)#(fU) | 218 |
| INHBA_XM_017012174_5587 | P(mU)#(fA)#(mC)(fA)(fG)(fG)(mC)(fU)(mU)(fC)(mA)(fG)(mA)(fU)#(mU)#(fA)#(mU)#(mC)#(mU)#(mU)#(fU) | 219 |
| INHBA_XM_017012174_1579 | P(mU)#(fU)#(mU)(fA)(fA)(fC)(mU)(fC)(mA)(fG)(mA)(fA)(mA)(fC)#(mC)#(fU)#(mU)#(mA)#(mA)#(mU)#(fU) | 220 |
| INHBA_XM_017012174_2396 | P(mU)#(fA)#(mG)(fA)(fA)(fA)(mU)(fG)(mU)(fU)(mU)(fG)(mG)(fA)#(mU)#(fC)#(mC)#(mA)#(mA)#(mU)#(fU) | 221 |
| INHBA_XM_017012174_4449 | P(mU)#(fA)#(mU)(fU)(fA)(fC)(mA)(fU)(mU)(fU)(mC)(fU)(mC)(fU)#(mG)#(fC)#(mU)#(mU)#(mC)#(mU)#(fU) | 222 |
| INHBA_XM_017012174_2320 | P(mU)#(fA)#(mG)(fA)(fU)(fU)(mA)(fC)(mU)(fU)(mC)(fC)(mA)(fA)#(mU)#(fA)#(mC)#(mA)#(mA)#(mU)#(fU) | 223 |
| INHBA_XM_017012174_2920 | P(mU)#(fU)#(mA)(fC)(fA)(fG)(mA)(fU)(mA)(fU)(mG)(fC)(mA)(fU)#(mA)#(fU)#(mG)#(mC)#(mA)#(mU)#(fU) | 224 |
| INHBA_XM_017012174_2321 | P(mU)#(fC)#(mA)(fG)(fA)(fU)(mU)(fA)(mC)(fU)(mU)(fC)(mC)(fA)#(mA)#(fU)#(mA)#(mC)#(mA)#(mU)#(fU) | 225 |
| INHBA_XM_017012174_3999 | P(mU)#(fG)#(mU)(fA)(fA)(fG)(mU)(fG)(mU)(fA)(mU)(fU)(mU)(fG)#(mC)#(fC)#(mC)#(mA)#(mG)#(mU)#(fU) | 226 |
| INHBA_XM_017012174_4833 | P(mU)#(fG)#(mA)(fG)(fC)(fU)(mU)(fC)(mU)(fA)(mA)(fG)(mA)(fU)#(mU)#(fG)#(mG)#(mU)#(mG)#(mU)#(fU) | 227 |
| INHBA_XM_017012174_5784 | P(mU)#(fA)#(mA)(fC)(fC)(fA)(mU)(fU)(mG)(fA)(mC)(fA)(mU)(fA)#(mG)#(fU)#(mU)#(mG)#(mA)#(mU)#(fU) | 228 |
| INHBA_XM_017012174_5797 | P(mU)#(fA)#(mU)(fA)(fA)(fA)(mU)(fA)(mU)(fU)(mA)(fA)(mG)(fA)#(mA)#(fA)#(mC)#(mC)#(mA)#(mU)#(fU) | 229 |
| INHBA_XM_017012174_4988 | P(mU)#(fU)#(mA)(fA)(fA)(fU)(mA)(fU)(mG)(fA)(mA)(fA)(mU)(fU)#(mG)#(fG)#(mU)#(mU)#(mG)#(mU)#(fU) | 230 |
| INHBA_XM_017012174_5728 | P(mU)#(fC)#(mC)(fA)(fA)(fA)(mC)(fA)(mG)(fA)(mC)(fA)(mU)(fU)#(mG)#(fG)#(mU)#(mU)#(mA)#(mU)#(fU) | 231 |
| INHBA_XM_017012174_3297 | P(mU)#(fA)#(mA)(fG)(fC)(fU)(mU)(fC)(mU)(fG)(mA)(fU)(mU)(fU)#(mA)#(fA)#(mG)#(mA)#(mU)#(mU)#(fU) | 232 |
| INHBA_XM_017012174_5341 | P(mU)#(fA)#(mC)(fA)(fG)(fC)(mU)(fU)(mC)(fU)(mC)(fA)(mG)(fU)#(mG)#(fA)#(mU)#(mA)#(mC)#(mU)#(fU) | 233 |
| INHBA_XM_017012174_3048 | P(mU)#(fU)#(mA)(fU)(fA)(fG)(mC)(fC)(mU)(fA)(mU)(fC)(mC)(fU)#(mU)#(fC)#(mU)#(mU)#(mA)#(mU)#(fU) | 234 |
| INHBA_XM_017012174_2219 | P(mU)#(fC)#(mG)(fA)(fA)(fA)(mU)(fG)(mU)(fA)(mA)(fC)(mU)(fU)#(mG)#(fG)#(mU)#(mA)#(mU)#(mU)#(fU) | 235 |
| INHBA_XM_017012174_5891 | P(mU)#(fA)#(mU)(fA)(fA)(fA)(mU)(fA)(mA)(fC)(mU)(fU)(mC)(fU)#(mG)#(fC)#(mU)#(mA)#(mU)#(mU)#(fU) | 236 |
| Inhba_NM_008380_6118 | P(mU)#(fA)#(mA)(fA)(fC)(fC)(mA)(fU)(mU)(fG)(mA)(fC)(mA)(fU)#(mA)#(fG)#(mU)#(mU)#(mG)#(mU)#(fU) | 237 |
| Inhba_NM_008380_5037 | P(mU)#(fA)#(mA)(fU)(fA)(fU)(mC)(fU)(mA)(fA)(mU)(fA)(mU)(fU)#(mG)#(fU)#(mU)#(mA)#(mA)#(mU)#(fU) | 238 |
| Inhba_NM_008380_2941 | P(mU)#(fA)#(mG)(fA)(fA)(fA)(mU)(fG)(mU)(fU)(mU)(fG)(mA)(fA)#(mU)#(fC)#(mC)#(mA)#(mA)#(mU)#(fU) | 239 |
| Inhba_NM_008380_2940 | P(mU)#(fG)#(mA)(fA)(fA)(fU)(mG)(fU)(mU)(fU)(mG)(fA)(mA)(fU)#(mC)#(fC)#(mA)#(mA)#(mC)#(mU)#(fU) | 240 |
| Inhba_NM_008380_4144 | P(mU)#(fU)#(mA)(fA)(fA)(fU)(mG)(fA)(mA)(fU)(mA)(fA)(mC)(fU)#(mG)#(fA)#(mU)#(mU)#(mA)#(mU)#(fU) | 241 |
| Inhba_NM_008380_5011 | P(mU)#(fC)#(mA)(fA)(fU)(fU)(mU)(fA)(mA)(fA)(mU)(fU)(mC)(fU)#(mA)#(fU)#(mU)#(mG)#(mC)#(mU)#(fU) | 242 |
| Inhba_NM_008380_3138 | P(mU)#(fA)#(mA)(fU)(fA)(fA)(mU)(fU)(mA)(fU)(mA)(fA)(mU)(fU)#(mA)#(fU)#(mA)#(mA)#(mU)#(mU)#(fU) | 243 |
| Inhba_NM_008380_2807 | P(mU)#(fA)#(mA)(fA)(fC)(fC)(mU)(fA)(mU)(fU)(mA)(fG)(mG)(fU)#(mU)#(fG)#(mC)#(mA)#(mU)#(mU)#(fU) | 244 |
| Inhba_NM_008380_3507 | P(mU)#(fG)#(mA)(fC)(fA)(fG)(mC)(fC)(mU)(fG)(mA)(fA)(mG)(fU)#(mG)#(fC)#(mU)#(mU)#(mA)#(mU)#(fU) | 245 |
| Inhba_NM_008380_4669 | P(mU)#(fA)#(mA)(fA)(fC)(fA)(mG)(fU)(mU)(fC)(mA)(fG)(mA)(fG)#(mG)#(fG)#(mC)#(mG)#(mC)#(mU)#(fU) | 246 |
| Inhba_NM_008380_5038 | P(mU)#(fC)#(mA)(fA)(fU)(fA)(mU)(fC)(mU)(fA)(mA)(fU)(mA)(fU)#(mU)#(fG)#(mU)#(mU)#(mA)#(mU)#(fU) | 247 |
| Inhba_NM_008380_6187 | P(mU)#(fC)#(mC)(fA)(fA)(fC)(mC)(fG)(mU)(fU)(mA)(fU)(mC)(fU)#(mC)#(fU)#(mU)#(mU)#(mA)#(mU)#(fU) | 248 |
| Inhba_NM_008380_4287 | P(mU)#(fG)#(mG)(fA)(fC)(fU)(mG)(fA)(mC)(fU)(mU)(fA)(mA)(fU)#(mG)#(fC)#(mU)#(mA)#(mA)#(mU)#(fU) | 249 |
| Inhba_NM_008380_4148 | P(mU)#(fU)#(mA)(fU)(fG)(fU)(mA)(fA)(mA)(fU)(mG)(fA)(mA)(fU)#(mA)#(fA)#(mC)#(mU)#(mG)#(mU)#(fU) | 250 |
| Inhba_NM_008380_4302 | P(mU)#(fA)#(mU)(fG)(fA)(fC)(mU)(fU)(mU)(fA)(mA)(fU)(mC)(fU)#(mA)#(fU)#(mG)#(mG)#(mA)#(mU)#(fU) | 251 |
| Inhba_NM_008380_5824 | P(mU)#(fA)#(mG)(fA)(fA)(fA)(mU)(fG)(mA)(fU)(mU)(fC)(mA)(fC)#(mU)#(fU)#(mU)#(mA)#(mU)#(mU)#(fU) | 252 |
| Inhba_NM_008380_5006 | P(mU)#(fU)#(mA)(fA)(fA)(fU)(mU)(fC)(mU)(fA)(mU)(fU)(mG)(fC)#(mA)#(fA)#(mG)#(mG)#(mC)#(mU)#(fU) | 253 |
| Inhba_NM_008380_3981 | P(mU)#(fA)#(mG)(fA)(fG)(fA)(mU)(fU)(mU)(fG)(mU)(fA)(mC)(fA)#(mA)#(fC)#(mU)#(mC)#(mC)#(mU)#(fU) | 254 |
| Inhba_NM_008380_5900 | P(mU)#(fA)#(mA)(fU)(fA)(fU)(mC)(fA)(mA)(fC)(mC)(fA)(mU)(fU)#(mG)#(fU)#(mC)#(mA)#(mA)#(mU)#(fU) | 255 |
| Inhba_NM_008380_6223 | P(mU)#(fA)#(mU)(fA)(fA)(fA)(mU)(fA)(mA)(fC)(mU)(fU)(mC)(fU)#(mG)#(fC)#(mU)#(mA)#(mU)#(mU)#(fU) | 256 |
| Inhba_NM_008380_4413 | P(mU)#(fG)#(mA)(fU)(fA)(fA)(mG)(fG)(mU)(fA)(mU)(fA)(mU)(fU)#(mG)#(fA)#(mC)#(mG)#(mG)#(mU)#(fU) | 257 |
| Inhba_NM_008380_4191 | P(mU)#(fA)#(mA)(fA)(fC)(fU)(mU)(fC)(mA)(fA)(mA)(fC)(mA)(fA)#(mG)#(fU)#(mC)#(mC)#(mG)#(mU)#(fU) | 258 |
| Inhba_NM_008380_6078 | P(mU)#(fA)#(mA)(fC)(fU)(fU)(mU)(fA)(mA)(fU)(mU)(fA)(mC)(fA)#(mU)#(fU)#(mA)#(mG)#(mC)#(mU)#(fU) | 259 |
| Inhba_NM_008380_5797 | P(mU)#(fU)#(mA)(fA)(fA)(fU)(mA)(fA)(mU)(fA)(mA)(fU)(mA)(fU)#(mA)#(fG)#(mC)#(mU)#(mG)#(mU)#(fU) | 260 |
| Inhba_NM_008380_4535 | P(mU)#(fA)#(mU)(fA)(fA)(fU)(mU)(fC)(mA)(fU)(mU)(fU)(mC)(fU)#(mU)#(fA)#(mU)#(mG)#(mC)#(mU)#(fU) | 261 |
| Inhba_NM_008380_3372 | P(mU)#(fA)#(mA)(fC)(fA)(fG)(mU)(fG)(mU)(fA)(mC)(fA)(mC)(fU)#(mA)#(fC)#(mU)#(mG)#(mU)#(mU)#(fU) | 262 |
| Inhba_NM_008380_3141 | P(mU)#(fA)#(mA)(fU)(fA)(fA)(mU)(fA)(mA)(fU)(mU)(fA)(mU)(fA)#(mA)#(fU)#(mU)#(mA)#(mU)#(mU)#(fU) | 263 |
| Inhba_NM_008380_3986 | P(mU)#(fA)#(mU)(fA)(fU)(fU)(mA)(fG)(mA)(fG)(mA)(fU)(mU)(fU)#(mG)#(fU)#(mA)#(mC)#(mA)#(mU)#(fU) | 264 |
| Inhba_NM_008380_3450 | P(mU)#(fU)#(mA)(fC)(fA)(fG)(mA)(fU)(mA)(fU)(mG)(fC)(mA)(fU)#(mA)#(fU)#(mG)#(mC)#(mA)#(mU)#(fU) | 265 |
| Inhba_NM_008380_3810 | P(mU)#(fA)#(mU)(fA)(fA)(fU)(mA)(fA)(mA)(fU)(mA)(fU)(mA)(fA)#(mG)#(fU)#(mU)#(mG)#(mA)#(mU)#(fU) | 266 |
| Inhba_NM_008380_6318 | P(mU)#(fA)#(mG)(fC)(fU)(fA)(mU)(fC)(mG)(fG)(mG)(fC)(mA)(fU)#(mU)#(fG)#(mC)#(mU)#(mG)#(mU)#(fU) | 267 |
| Inhba_NM_008380_6117 | P(mU)#(fA)#(mA)(fC)(fC)(fA)(mU)(fU)(mG)(fA)(mC)(fA)(mU)(fA)#(mG)#(fU)#(mU)#(mG)#(mA)#(mU)#(fU) | 268 |
| Inhba_NM_008380_6130 | P(mU)#(fA)#(mU)(fA)(fA)(fA)(mU)(fA)(mU)(fU)(mA)(fA)(mG)(fA)#(mA)#(fA)#(mC)#(mC)#(mA)#(mU)#(fU) | 269 |
| Inhba_NM_008380_4771 | P(mU)#(fU)#(mA)(fA)(fA)(fU)(mC)(fC)(mU)(fG)(mC)(fU)(mC)(fU)#(mU)#(fC)#(mC)#(mC)#(mA)#(mU)#(fU) | 270 |
| Inhba_NM_008380_1767 | P(mU)#(fA)#(mU)(fG)(fA)(fC)(mU)(fU)(mA)(fA)(mG)(fG)(mU)(fU)#(mG)#(fG)#(mC)#(mA)#(mA)#(mU)#(fU) | 271 |
| Inhba_NM_008380_5895 | P(mU)#(fC)#(mA)(fA)(fC)(fC)(mA)(fU)(mU)(fG)(mU)(fC)(mA)(fA)#(mU)#(fG)#(mC)#(mA)#(mC)#(mU)#(fU) | 272 |
| Inhba_NM_008380_6079 | P(mU)#(fC)#(mA)(fA)(fC)(fU)(mU)(fU)(mA)(fA)(mU)(fU)(mA)(fC)#(mA)#(fU)#(mU)#(mA)#(mG)#(mU)#(fU) | 273 |
| Inhba_NM_008380_3578 | P(mU)#(fA)#(mU)(fC)(fA)(fC)(mU)(fU)(mA)(fU)(mC)(fC)(mU)(fU)#(mC)#(fU)#(mU)#(mA)#(mA)#(mU)#(fU) | 274 |
| Inhba_NM_008380_2405 | P(mU)#(fG)#(mA)(fG)(fA)(fU)(mA)(fG)(mU)(fG)(mU)(fC)(mA)(fC)#(mA)#(fU)#(mA)#(mG)#(mA)#(mU)#(fU) | 275 |
| Inhba_NM_008380_2764 | P(mU)#(fC)#(mG)(fA)(fA)(fA)(mU)(fG)(mU)(fA)(mA)(fC)(mU)(fU)#(mG)#(fG)#(mU)#(mA)#(mU)#(mU)#(fU) | 276 |
| Inhba_NM_008380_2915 | P(mU)#(fC)#(mA)(fA)(fA)(fC)(mA)(fU)(mA)(fU)(mU)(fC)(mC)(fU)#(mU)#(fU)#(mC)#(mA)#(mA)#(mU)#(fU) | 277 |
| Inhba_NM_008380_6218 | P(mU)#(fU)#(mA)(fA)(fC)(fU)(mU)(fC)(mU)(fG)(mC)(fU)(mA)(fU)#(mA)#(fA)#(mA)#(mC)#(mA)#(mU)#(fU) | 278 |
| Inhba_NM_008380_5004 | P(mU)#(fA)#(mA)(fU)(fU)(fC)(mU)(fA)(mU)(fU)(mG)(fC)(mA)(fA)#(mG)#(fG)#(mC)#(mC)#(mA)#(mU)#(fU) | 279 |
| Inhba_NM_008380_3013 | P(mU)#(fA)#(mA)(fG)(fG)(fA)(mU)(fU)(mA)(fG)(mA)(fC)(mA)(fG)#(mG)#(fU)#(mC)#(mA)#(mA)#(mU)#(fU) | 280 |
| Inhba_NM_008380_6066 | P(mU)#(fA)#(mU)(fU)(fA)(fG)(mC)(fC)(mA)(fG)(mA)(fC)(mA)(fU)#(mU)#(fG)#(mG)#(mU)#(mU)#(mU)#(fU) | 281 |
| Inhba_NM_008380_5511 | P(mU)#(fA)#(mU)(fA)(fA)(fC)(mU)(fG)(mA)(fG)(mG)(fC)(mA)(fU)#(mG)#(fU)#(mU)#(mU)#(mG)#(mU)#(fU) | 282 |
| Inhba_NM_008380_5049 | P(mU)#(fU)#(mA)(fA)(fA)(fU)(mU)(fG)(mU)(fU)(mA)(fA)(mC)(fA)#(mA)#(fU)#(mA)#(mU)#(mC)#(mU)#(fU) | 283 |
| Inhba_NM_008380_6149 | P(mU)#(fU)#(mU)(fA)(fC)(fC)(mA)(fG)(mC)(fA)(mC)(fU)(mU)(fC)#(mU)#(fA)#(mC)#(mA)#(mA)#(mU)#(fU) | 284 |

m is2′-O-methyl nucleosides;
f is 2′-Fluoro nucleosides;
P is 5′-(E)-Vinylphosphonate;
# is phosphorothioate linkage;
TegChol is TEG linker + cholesterol

[0084] In some embodiments, INHBA specific siRNA comprises an anti-sense strand that comprises the nucleic acid sequence with chemical modification pattern set forth in Table 3. In some embodiments, INHBA specific siRNA comprises an anti-sense strand that comprises the nucleic acid sequence with chemical modification pattern as set forth in SEQ ID NOs: 189-284. In some embodiments, INHBA specific siRNA comprises a sense strand that comprises the nucleic acid sequence with chemical modification pattern set forth in Table3. In some embodiments, INHBA specific siRNA comprises a sense strand that comprises the nucleic acid sequence with chemical modification pattern as set forth in SEQ ID NOs: 93-188.

iii. Human and Mouse Myostatin (MSTN) Specific siRNAs

[0085] In some aspects, an siRNA described herein specifically targets MSTN nucleic acid sequence (e.g., MSTN gene and/or MSTN mRNA). In some embodiments, an siRNA described herein specifically targets mouse and/or MSTN nucleic acid sequence (referred to as MSTN specific siRNA). Exemplary MSTN target gene region sequences and corresponding target sequences are set forth in Tables 11 and 12.

TABLE 11
Human MSTN target gene regions sequences and target sequences

| Accession | | | SEQ | | SEQ |
|---|---|---|---|---|---|
| number | Position | Target sequence | ID NO | Gene region | ID NO |
| NM_005259 | 246 | UGUGUAAUGCAUG | 1473 | TGGAAAAAGAGGGGCTGTGTAAT | 1376 |
| | | UACUUGG | | GCATGTACTTGGAGACAAAACA | |
| NM_005259 | 284 | UCAAGAAUAGAAG | 1474 | CAAAACACTAAATCTTCAAGAAT | 1377 |
| | | CCAUUAA | | AGAAGCCATTAAGATACAAATC | |
| NM_005259 | 296 | GCCAUUAAGAUAC | 1475 | TCTTCAAGAATAGAAGCCATTAA | 1378 |
| | | AAAUCCU | | GATACAAATCCTCAGTAAACTT | |
| NM_005259 | 344 | AACAUCAGCAAAG | 1476 | CTGGAAACAGCTCCTAACATCAG | 1379 |
| | | AUGUUAU | | CAAAGATGTTATAAGACAACTT | |
| NM_005259 | 542 | UGUUGCUUCUUUA | 1477 | GATGGAAAACCCAAATGTTGCTT | 1380 |
| | | AAUUUAG | | CTTTAAATTTAGCTCTAAAATA | |
| NM_005259 | 585 | UAGUAAAGGCCCA | 1478 | TACAATACAATAAAGTAGTAAAG | 1381 |
| | | ACUAUGG | | GCCCAACTATGGATATATTTGA | |
| NM_005259 | 622 | CGAGACUCCUACA | 1479 | ATATTTGAGACCCGTCGAGACTC | 1382 |
| | | ACAGUGU | | CTACAACAGTGTTTGTGCAAAT | |
| NM_005259 | 626 | ACUCCUACAACAG | 1480 | TTGAGACCCGTCGAGACTCCTAC | 1383 |
| | | UGUUUGU | | AACAGTGTTTGTGCAAATCCTG | |
| NM_005259 | 752 | GAUGUGAAGACAG | 1481 | ATTTGGCAGAGCATTGATGTGAA | 1384 |
| | | UGUUGCA | | GACAGTGTTGCAAAATTGGCTC | |
| NM_005259 | 959 | UCAACAGAAUCAC | 1482 | GACTGTGATGAGCACTCAACAGA | 1385 |
| | | GAUGCUG | | ATCACGATGCTGTCGTTACCCT | |
| NM_005259 | 1011 | UUGGAUGGGAUUG | 1483 | TGGATTTTGAAGCTTTTGGATGG | 1386 |
| | | GAUUAUC | | GATTGGATTATCGCTCCTAAAA | |
| NM_005259 | 1015 | AUGGGAUUGGAUU | 1484 | TTTTGAAGCTTTTGGATGGGATT | 1387 |
| | | AUCGCUC | | GGATTATCGCTCCTAAAAGATA | |
| NM_005259 | 1055 | UACUGCUCUGGAG | 1485 | AGATATAAGGCCAATTACTGCTC | 1388 |
| | | AGUGUGA | | TGGAGAGTGTGAATTTGTATTT | |
| NM_005259 | 1061 | UCUGGAGAGUGUG | 1486 | AAGGCCAATTACTGCTCTGGAGA | 1389 |
| | | AAUUUGU | | GTGTGAATTTGTATTTTTACAA | |
| NM_005259 | 1062 | CUGGAGAGUGUGA | 1487 | AGGCCAATTACTGCTCTGGAGAG | 1390 |
| | | AUUUGUA | | TGTGAATTTGTATTTTTACAAA | |
| NM_005259 | 1168 | GUCUCCAAUUAAU | 1488 | TACTCCCACAAAGATGTCTCCAA | 1391 |
| | | AUGCUAU | | TTAATATGCTATATTTTAATGG | |
| NM_005259 | 1169 | UCUCCAAUUAAUA | 1489 | ACTCCCACAAAGATGTCTCCAAT | 1392 |
| | | UGCUAUA | | TAATATGCTATATTTTAATGGC | |
| NM_005259 | 1172 | CCAAUUAAUAUGC | 1490 | CCCACAAAGATGTCTCCAATTAA | 1393 |
| | | UAUAUUU | | TATGCTATATTTTAATGGCAAA | |
| NM_005259 | 1193 | AAUGGCAAAGAAC | 1491 | AATATGCTATATTTTAATGGCAA | 1394 |
| | | AAAUAAU | | AGAACAAATAATATATGGGAAA | |
| NM_005259 | 1194 | AUGGCAAAGAACA | 1492 | ATATGCTATATTTTAATGGCAAA | 1395 |
| | | AAUAAUA | | GAACAAATAATATATGGGAAAA | |
| NM_005259 | 1196 | GGCAAAGAACAAA | 1493 | ATGCTATATTTTAATGGCAAAGA | 1396 |
| | | UAAUAUA | | ACAAATAATATATGGGAAAATT | |
| NM_005259 | 1377 | UAAGCAUAAGCUA | 1494 | TATGCTACAGTCACTTAAGCATA | 1397 |
| | | CAGUAUG | | AGCTACAGTATGTAAACTAAAA | |
| NM_005259 | 1409 | GGGAAUAUAUGCA | 1495 | ATGTAAACTAAAAGGGGGAATAT | 1398 |
| | | AUGGUUG | | ATGCAATGGTTGGCATTTAACC | |
| NM_005259 | 1464 | UUUAUGAUUUCCA | 1496 | ATCATACAAGAAAGTTTTATGAT | 1399 |
| | | GAGUUUU | | TTCCAGAGTTTTTGAGCTAGAA | |
| NM_005259 | 1482 | UUUGAGCUAGAAG | 1497 | ATGATTTCCAGAGTTTTTGAGCT | 1400 |
| | | GAGAUCA | | AGAAGGAGATCAAATTACATTT | |
| NM_005259 | 1483 | UUGAGCUAGAAGG | 1498 | TGATTTCCAGAGTTTTTGAGCTA | 1401 |
| | | AGAUCAA | | GAAGGAGATCAAATTACATTTA | |
| NM_005259 | 1495 | GAGAUCAAAUUAC | 1499 | TTTTTGAGCTAGAAGGAGATCAA | 1402 |
| | | AUUUAUG | | ATTACATTTATGTTCCTATATA | |
| NM_005259 | 1498 | AUCAAAUUACAUU | 1500 | TTGAGCTAGAAGGAGATCAAATT | 1403 |
| | | UAUGUUC | | ACATTTATGTTCCTATATATTA | |
| NM_005259 | 1500 | CAAAUUACAUUUA | 1501 | GAGCTAGAAGGAGATCAAATTAC | 1404 |
| | | UGUUCCU | | ATTTATGTTCCTATATATTACA | |
| NM_005259 | 1502 | AAUUACAUUUAUG | 1502 | GCTAGAAGGAGATCAAATTACAT | 1405 |
| | | UUCCUAU | | TTATGTTCCTATATATTACAAC | |
| NM_005259 | 1516 | UCCUAUAUAUUAC | 1503 | AAATTACATTTATGTTCCTATAT | 1406 |
| | | AACAUCG | | ATTACAACATCGGCGAGGAAAT | |
| NM_005259 | 1538 | GAGGAAAUGAAAG | 1504 | TATTACAACATCGGCGAGGAAAT | 1407 |
| | | CGAUUCU | | GAAAGCGATTCTCCTTGAGTTC | |
| NM_005259 | 1568 | UGAUGAAUUAAAG | 1505 | ATTCTCCTTGAGTTCTGATGAAT | 1408 |
| | | GAGUAUG | | TAAAGGAGTATGCTTTAAAGTC | |
| NM_005259 | 1583 | GUAUGCUUUAAAG | 1506 | TGATGAATTAAAGGAGTATGCTT | 1409 |
| | | UCUAUUU | | TAAAGTCTATTTCTTTAAAGTT | |
| NM_005259 | 1589 | UUUAAAGUCUAUU | 1507 | ATTAAAGGAGTATGCTTTAAAGT | 1410 |
| | | UCUUUAA | | CTATTTCTTTAAAGTTTTGTTT | |
| NM_005259 | 1595 | GUCUAUUUCUUUA | 1508 | GGAGTATGCTTTAAAGTCTATTT | 1411 |
| | | AAGUUUU | | CTTTAAAGTTTTGTTTAATATT | |
| NM_005259 | 1663 | AUUGUUAUAUACC | 1509 | TTGGTAAAATGCAGGATTGTTAT | 1412 |
| | | AUCAUUC | | ATACCATCATTCGAATCATCCT | |
| NM_005259 | 1663 | AUUGUUAUAUACC | 1510 | TTGGTAAAATGCAGGATTGTTAT | 1413 |
| | | AUCAUUC | | ATACCATCATTCGAATCATCCT | |
| NM_005259 | 1682 | CGAAUCAUCCUUA | 1511 | TTATATACCATCATTCGAATCAT | 1414 |
| | | AACACUU | | CCTTAAACACTTGAATTTATAT | |
| NM_005259 | 1691 | CUUAAACACUUGA | 1512 | ATCATTCGAATCATCCTTAAACA | 1415 |
| | | AUUUAUA | | CTTGAATTTATATTGTATGGTA | |
| NM_005259 | 1694 | AAACACUUGAAUU | 1513 | ATTCGAATCATCCTTAAACACTT | 1416 |
| | | UAUAUUG | | GAATTTATATTGTATGGTAGTA | |
| NM_005259 | 1698 | ACUUGAAUUUAUA | 1514 | GAATCATCCTTAAACACTTGAAT | 1417 |
| | | UUGUAUG | | TTATATTGTATGGTAGTATACT | |
| NM_005259 | 1753 | AGGGAUGGUGCAG | 1515 | AAATTCCACAAAAATAGGGATGG | 1418 |
| | | CAUAUGC | | TGCAGCATATGCAATTTCCATT | |
| NM_005259 | 1761 | UGCAGCAUAUGCA | 1516 | CAAAAATAGGGATGGTGCAGCAT | 1419 |
| | | AUUUCCA | | ATGCAATTTCCATTCCTATTAT | |
| NM_005259 | 2010 | GGAGAAACUGCAU | 1517 | TTCTGTAGCATACTTGGAGAAAC | 1420 |
| | | UAUCUUA | | TGCATTATCTTAAAAGGCAGTC | |
| NM_005259 | 2080 | UUGGAGAAGUAUG | 1518 | GTCAAAATAACATACTTGGAGAA | 1421 |
| | | UAAUUUU | | GTATGTAATTTTGTCTTTGGAA | |
| NM_005259 | 2119 | ACUGCCUUUGCAA | 1519 | TTGGAAAATTACAACACTGCCTT | 1422 |
| | | CACUGCA | | TGCAACACTGCAGTTTTTATGG | |
| NM_005259 | 2124 | CUUUGCAACACUG | 1520 | AAATTACAACACTGCCTTTGCAA | 1423 |
| | | CAGUUUU | | CACTGCAGTTTTTATGGTAAAA | |
| NM_005259 | 2155 | AAUAGAAAUGAUC | 1521 | TTTTTATGGTAAAATAATAGAAA | 1424 |
| | | GACUCUA | | TGATCGACTCTATCAATATTGT | |
| NM_005259 | 2156 | AUAGAAAUGAUCG | 1522 | TTTTATGGTAAAATAATAGAAAT | 1425 |
| | | ACUCUAU | | GATCGACTCTATCAATATTGTA | |
| NM_005259 | 2164 | GAUCGACUCUAUC | 1523 | TAAAATAATAGAAATGATCGACT | 1426 |
| | | AAUAUUG | | CTATCAATATTGTATAAAAAGA | |
| NM_005259 | 2168 | GACUCUAUCAAUA | 1524 | ATAATAGAAATGATCGACTCTAT | 1427 |
| | | UUGUAUA | | CAATATTGTATAAAAAGACTGA | |
| NM_005259 | 2188 | AAAAGACUGAAAC | 1525 | TATCAATATTGTATAAAAAGACT | 1428 |
| | | AAUGCAU | | GAAACAATGCATTTATATAATA | |
| NM_005259 | 2193 | ACUGAAACAAUGC | 1526 | ATATTGTATAAAAAGACTGAAAC | 1429 |
| | | AUUUAUA | | AATGCATTTATATAATATGTAT | |
| NM_005259 | 2195 | UGAAACAAUGCAU | 1527 | ATTGTATAAAAAGACTGAAACAA | 1430 |
| | | UUAUAUA | | TGCATTTATATAATATGTATAC | |
| NM_005259 | 2196 | GAAACAAUGCAUU | 1528 | TTGTATAAAAAGACTGAAACAAT | 1431 |
| | | UAUAUAA | | GCATTTATATAATATGTATACA | |
| NM_005259 | 2209 | UAUAUAAUAUGUA | 1529 | CTGAAACAATGCATTTATATAAT | 1432 |
| | | UACAAUA | | ATGTATACAATATTGTTTTGTA | |
| NM_005259 | 2212 | AUAAUAUGUAUAC | 1530 | AAACAATGCATTTATATAATATG | 1433 |
| | | AAUAUUG | | TATACAATATTGTTTTGTAAAT | |
| NM_005259 | 2216 | UAUGUAUACAAUA | 1531 | AATGCATTTATATAATATGTATA | 1434 |
| | | UUGUUUU | | CAATATTGTTTTGTAAATAAGT | |
| NM_005259 | 2230 | UGUUUUGUAAAUA | 1532 | ATATGTATACAATATTGTTTTGT | 1435 |
| | | AGUGUCU | | AAATAAGTGTCTCCTTTTTTAT | |
| NM_005259 | 2232 | UUUUGUAAAUAAG | 1533 | ATGTATACAATATTGTTTTGTAA | 1436 |
| | | UGUCUCC | | ATAAGTGTCTCCTTTTTTATTT | |
| NM_005259 | 2233 | UUUGUAAAUAAGU | 1534 | TGTATACAATATTGTTTTGTAAA | 1437 |
| | | GUCUCCU | | TAAGTGTCTCCTTTTTTATTTA | |
| NM_005259 | 2234 | UUGUAAAUAAGUG | 1535 | GTATACAATATTGTTTTGTAAAT | 1438 |
| | | UCUCCUU | | AAGTGTCTCCTTTTTTATTTAC | |
| NM_005259 | 2274 | UUUUACACUAAGG | 1536 | TTTACTTTGGTATATTTTTACAC | 1439 |
| | | ACAUUUC | | TAAGGACATTTCAAATTAAGTA | |
| NM_005259 | 2276 | UUACACUAAGGAC | 1537 | TACTTTGGTATATTTTTACACTA | 1440 |
| | | AUUUCAA | | AGGACATTTCAAATTAAGTACT | |
| NM_005259 | 2283 | AAGGACAUUUCAA | 1538 | GTATATTTTTACACTAAGGACAT | 1441 |
| | | AUUAAGU | | TTCAAATTAAGTACTAAGGCAC | |
| NM_005259 | 2363 | AUUAGCAGAUUAA | 1539 | TATATTTCAGAGCAAATTAGCAG | 1442 |
| | | AUAGUGG | | ATTAAATAGTGGTCTTAAAACT | |
| NM_005259 | 2364 | UUAGCAGAUUAAA | 1540 | ATATTTCAGAGCAAATTAGCAGA | 1443 |
| | | UAGUGGU | | TTAAATAGTGGTCTTAAAACTC | |
| NM_005259 | 2365 | UAGCAGAUUAAAU | 1541 | TATTTCAGAGCAAATTAGCAGAT | 1444 |
| | | AGUGGUC | | TAAATAGTGGTCTTAAAACTCC | |
| NM_005259 | 2397 | AUGUUAAUGAUUA | 1542 | GTCTTAAAACTCCATATGTTAAT | 1445 |
| | | GAUGGUU | | GATTAGATGGTTATATTACAAT | |
| NM_005259 | 2406 | AUUAGAUGGUUAU | 1543 | CTCCATATGTTAATGATTAGATG | 1446 |
| | | AUUACAA | | GTTATATTACAATCATTTTATA | |
| NM_005259 | 2411 | AUGGUUAUAUUAC | 1544 | TATGTTAATGATTAGATGGTTAT | 1447 |
| | | AAUCAUU | | ATTACAATCATTTTATATTTTT | |
| NM_005259 | 2439 | UUUUACAUGAUUA | 1545 | AATCATTTTATATTTTTTTACAT | 1448 |
| | | ACAUUCA | | GATTAACATTCACTTATGGATT | |
| NM_005259 | 2440 | UUUACAUGAUUAA | 1546 | ATCATTTTATATTTTTTTACATG | 1449 |
| | | CAUUCAC | | ATTAACATTCACTTATGGATTC | |
| NM_005259 | 2475 | GGCUGUAUAAAGU | 1547 | TTATGGATTCATGATGGCTGTAT | 1450 |
| | | GAAUUUG | | AAAGTGAATTTGAAATTTCAAT | |
| NM_005259 | 2491 | UUUGAAAUUUCAA | 1548 | GCTGTATAAAGTGAATTTGAAAT | 1451 |
| | | UGGUUUA | | TTCAATGGTTTACTGTCATTGT | |
| NM_005259 | 2493 | UGAAAUUUCAAUG | 1549 | TGTATAAAGTGAATTTGAAATTT | 1452 |
| | | GUUUACU | | CAATGGTTTACTGTCATTGTGT | |
| NM_005259 | 2513 | GUCAUUGUGUUUA | 1550 | TTTCAATGGTTTACTGTCATTGT | 1453 |
| | | AAUCUCA | | GTTTAAATCTCAACGTTCCATT | |
| NM_005259 | 2519 | GUGUUUAAAUCUC | 1551 | TGGTTTACTGTCATTGTGTTTAA | 1454 |
| | | AACGUUC | | ATCTCAACGTTCCATTATTTTA | |
| NM_005259 | 2521 | GUUUAAAUCUCAA | 1552 | GTTTACTGTCATTGTGTTTAAAT | 1455 |
| | | CGUUCCA | | CTCAACGTTCCATTATTTTAAT | |
| NM_005259 | 2609 | AAUAAACUGAUGC | 1553 | TTATCTGAAATGAAGAATAAACT | 1456 |
| | | UAUCUCA | | GATGCTATCTCAACAATAACTG | |
| NM_005259 | 2622 | UAUCUCAACAAUA | 1554 | AGAATAAACTGATGCTATCTCAA | 1457 |
| | | ACUGUUA | | CAATAACTGTTACTTTTATTTT | |
| NM_005259 | 2623 | AUCUCAACAAUAA | 1555 | GAATAAACTGATGCTATCTCAAC | 1458 |
| | | CUGUUAC | | AATAACTGTTACTTTTATTTTA | |
| NM_005259 | 2649 | UUUAUAAUUUGAU | 1556 | AACTGTTACTTTTATTTTATAAT | 1459 |
| | | AAUGAAU | | TTGATAATGAATATATTTCTGC | |
| NM_005259 | 2657 | UUGAUAAUGAAUA | 1557 | CTTTTATTTTATAATTTGATAAT | 1460 |
| | | UAUUUCU | | GAATATATTTCTGCATTTATTT | |
| NM_005259 | 2658 | UGAUAAUGAAUAU | 1558 | TTTTATTTTATAATTTGATAATG | 1461 |
| | | AUUUCUG | | AATATATTTCTGCATTTATTTA | |
| NM_005259 | 2661 | UAAUGAAUAUAUU | 1559 | TATTTTATAATTTGATAATGAAT | 1462 |
| | | UCUGCAU | | ATATTTCTGCATTTATTTACTT | |
| NM_005259 | 2671 | AUUUCUGCAUUUA | 1560 | TTTGATAATGAATATATTTCTGC | 1463 |
| | | UUUACUU | | ATTTATTTACTTCTGTTTTGTA | |
| NM_005259 | 2675 | CUGCAUUUAUUUA | 1561 | ATAATGAATATATTTCTGCATTT | 1464 |
| | | CUUCUGU | | ATTTACTTCTGTTTTGTAAATT | |
| NM_005259 | 2711 | UUGUUAAUCAAAU | 1562 | TTGTAAATTGGGATTTTGTTAAT | 1465 |
| | | UUAUUGU | | CAAATTTATTGTACTATGACTA | |
| NM_005259 | 2733 | UAUGACUAAAUGA | 1563 | TCAAATTTATTGTACTATGACTA | 1466 |
| | | AAUUAUU | | AATGAAATTATTTCTTACATCT | |
| NM_005259 | 2734 | AUGACUAAAUGAA | 1564 | CAAATTTATTGTACTATGACTAA | 1467 |
| | | AUUAUUU | | ATGAAATTATTTCTTACATCTA | |
| NM_005259 | 2750 | AUUUCUUACAUCU | 1565 | TGACTAAATGAAATTATTTCTTA | 1468 |
| | | AAUUUGU | | CATCTAATTTGTAGAAACAGTA | |
| NM_005259 | 2753 | UCUUACAUCUAAU | 1566 | CTAAATGAAATTATTTCTTACAT | 1469 |
| | | UUGUAGA | | CTAATTTGTAGAAACAGTATAA | |
| NM_005259 | 2765 | UUUGUAGAAACAG | 1567 | ATTTCTTACATCTAATTTGTAGA | 1470 |
| | | UAUAAGU | | AACAGTATAAGTTATATTAAAG | |
| NM_005259 | 2767 | UGUAGAAACAGUA | 1568 | TTCTTACATCTAATTTGTAGAAA | 1471 |
| | | UAAGUUA | | CAGTATAAGTTATATTAAAGTG | |
| NM_005259 | 2770 | AGAAACAGUAUAA | 1569 | TTACATCTAATTTGTAGAAACAG | 1472 |
| | | GUUAUAU | | TATAAGTTATATTAAAGTGTTT | |

TABLE 12
Mouse Mstn target gene regions sequences and target sequences

| Accession | | | SEQ | | SEQ |
|---|---|---|---|---|---|
| number | Position | Target sequence | ID NO | Gene region | ID NO |
| NM_010834 | 78 | AAGAAGAAAUAAGAAC | 1288 | TTACTCAAAAGCAAAAAGAAGAA | 1200 |
| | | AAGG | | ATAAGAACAAGGGAAAAAAAAA | |
| NM_010834 | 242 | UGUGUAAUGCAUGUGC | 1289 | TGGAAAAAGAGGGGCTGTGTAAT | 1201 |
| | | GUGG | | GCATGTGCGTGGAGACAAAACA | |
| NM_010834 | 277 | UACUCCAGAAUAGAAG | 1290 | AGACAAAACACGAGGTACTCCAG | 1202 |
| | | CCAU | | AATAGAAGCCATAAAAATTCAA | |
| NM_010834 | 523 | GAUGGCAAGCCCAAAU | 1291 | TTTCTAATGCAAGCGGATGGCAA | 1203 |
| | | GUUG | | GCCCAAATGTTGCTTTTTTAAA | |
| NM_010834 | 524 | AUGGCAAGCCCAAAUG | 1292 | TTCTAATGCAAGCGGATGGCAAG | 1204 |
| | | UUGC | | CCCAAATGTTGCTTTTTTAAAT | |
| NM_010834 | 618 | CAAGACUCCUACAACA | 1293 | ATATCTCAGACCCGTCAAGACTC | 1205 |
| | | GUGU | | CTACAACAGTGTTTGTGCAAAT | |
| NM_010834 | 780 | ACAGCCUGAAUCCAAC | 1294 | GCAAAATTGGCTCAAACAGCCTG | 1206 |
| | | UUAG | | AATCCAACTTAGGCATTGAAAT | |
| NM_010834 | 1007 | UUGGAUGGGACUGGAU | 1295 | TCGATTTTGAAGCCTTTGGATGG | 1207 |
| | | UAUC | | GACTGGATTATCGCACCCAAAA | |
| NM_010834 | 1051 | UACUGCUCAGGAGAGU | 1296 | AGATATAAGGCCAATTACTGCTC | 1208 |
| | | GUGA | | AGGAGAGTGTGAATTTGTGTTT | |
| NM_010834 | 1057 | UCAGGAGAGUGUGAAU | 1297 | AAGGCCAATTACTGCTCAGGAGA | 1209 |
| | | UUGU | | GTGTGAATTTGTGTTTTTACAA | |
| NM_010834 | 1058 | CAGGAGAGUGUGAAUU | 1298 | AGGCCAATTACTGCTCAGGAGAG | 1210 |
| | | UGUG | | TGTGAATTTGTGTTTTTACAAA | |
| NM_010834 | 1168 | CCCAUUAAUAUGCUAU | 1299 | CCGACAAAAATGTCTCCCATTAA | 1211 |
| | | AUUU | | TATGCTATATTTTAATGGCAAA | |
| NM_010834 | 1189 | AAUGGCAAAGAACAAA | 1300 | AATATGCTATATTTTAATGGCAA | 1212 |
| | | UAAU | | AGAACAAATAATATATGGGAAA | |
| NM_010834 | 1190 | AUGGCAAAGAACAAAU | 1301 | ATATGCTATATTTTAATGGCAAA | 1213 |
| | | AAUA | | GAACAAATAATATATGGGAAAA | |
| NM_010834 | 1192 | GGCAAAGAACAAAUAA | 1302 | ATGCTATATTTTAATGGCAAAGA | 1214 |
| | | UAUA | | ACAAATAATATATGGGAAAATT | |
| NM_010834 | 1262 | UGCAUUAGGUUAGAAA | 1303 | GGTGCTCATGAGCTTTGCATTAG | 1215 |
| | | UUUC | | GTTAGAAATTTCCCAAGTCATG | |
| NM_010834 | 1325 | UCAAGCACCACAGGCU | 1304 | TTCGAAACTGTGAATTCAAGCAC | 1216 |
| | | GUAG | | CACAGGCTGTAGGCCTTGAGTA | |
| NM_010834 | 1370 | AGCACAAGCUACAGUG | 1305 | TGCTCTAGTAACGTAAGCACAAG | 1217 |
| | | UAUG | | CTACAGTGTATGAACTAAAAGA | |
| NM_010834 | 1416 | GUUGGCAUUCAACCAC | 1306 | AGAATAGATGCAATGGTTGGCAT | 1218 |
| | | CAAA | | TCAACCACCAAAATAAACCATA | |
| NM_010834 | 1449 | UAGGAUGUUGUAUGAU | 1307 | AAATAAACCATACTATAGGATGT | 1219 |
| | | UUCC | | TGTATGATTTCCAGAGTTTTTG | |
| NM_010834 | 1454 | UGUUGUAUGAUUUCCA | 1308 | AACCATACTATAGGATGTTGTAT | 1220 |
| | | GAGU | | GATTTCCAGAGTTTTTGAAATA | |
| NM_010834 | 1485 | AUGGAGAUCAAAUUAC | 1309 | GAGTTTTTGAAATAGATGGAGAT | 1221 |
| | | AUUU | | CAAATTACATTTATGTCCATAT | |
| NM_010834 | 1489 | AGAUCAAAUUACAUUU | 1310 | TTTTGAAATAGATGGAGATCAAA | 1222 |
| | | AUGU | | TTACATTTATGTCCATATATGT | |
| NM_010834 | 1600 | AGUCUUAUUUCCUAAC | 1311 | ATGATTAAAAGGTAAAGTCTTAT | 1223 |
| | | AGUU | | TTCCTAACAGTTTCACTTAATA | |
| NM_010834 | 1602 | UCUUAUUUCCUAACAG | 1312 | GATTAAAAGGTAAAGTCTTATTT | 1224 |
| | | UUUC | | CCTAACAGTTTCACTTAATATT | |
| NM_010834 | 1603 | CUUAUUUCCUAACAGU | 1313 | ATTAAAAGGTAAAGTCTTATTTC | 1225 |
| | | UUCA | | CTAACAGTTTCACTTAATATTT | |
| NM_010834 | 1632 | UACGGAAGAAUCUAUA | 1314 | GTTTCACTTAATATTTACGGAAG | 1226 |
| | | UGUA | | AATCTATATGTAGCCTTTGTAA | |
| NM_010834 | 1633 | ACGGAAGAAUCUAUAU | 1315 | TTTCACTTAATATTTACGGAAGA | 1227 |
| | | GUAG | | ATCTATATGTAGCCTTTGTAAA | |
| NM_010834 | 1635 | GGAAGAAUCUAUAUGU | 1316 | TCACTTAATATTTACGGAAGAAT | 1228 |
| | | AGCC | | CTATATGTAGCCTTTGTAAAGT | |
| NM_010834 | 1656 | UUGUAAAGUGUAGGAU | 1317 | ATCTATATGTAGCCTTTGTAAAG | 1229 |
| | | UGUU | | TGTAGGATTGTTATCATTTAAA | |
| NM_010834 | 1657 | UGUAAAGUGUAGGAUU | 1318 | TCTATATGTAGCCTTTGTAAAGT | 1230 |
| | | GUUA | | GTAGGATTGTTATCATTTAAAA | |
| NM_010834 | 1691 | CAUGUACACUUAUAUU | 1319 | ATCATTTAAAAACATCATGTACA | 1231 |
| | | UGUA | | CTTATATTTGTATTGTATACTT | |
| NM_010834 | 1696 | ACACUUAUAUUUGUAU | 1320 | TTAAAAACATCATGTACACTTAT | 1232 |
| | | UGUA | | ATTTGTATTGTATACTTGGTAA | |
| NM_010834 | 1704 | AUUUGUAUUGUAUACU | 1321 | ATCATGTACACTTATATTTGTAT | 1233 |
| | | UGGU | | TGTATACTTGGTAAGATAAAAT | |
| NM_010834 | 1705 | UUUGUAUUGUAUACUU | 1322 | TCATGTACACTTATATTTGTATT | 1234 |
| | | GGUA | | GTATACTTGGTAAGATAAAATT | |
| NM_010834 | 1733 | UUCCACAAAGUAGGAA | 1323 | CTTGGTAAGATAAAATTCCACAA | 1235 |
| | | UGGG | | AGTAGGAATGGGGCCTTACATA | |
| NM_010834 | 1928 | UUAAGGAAAGAAGAAU | 1324 | TTCAATGCATTTTCTTTAAGGAA | 1236 |
| | | CUUU | | AGAAGAATCTTTTTTTCTAGAG | |
| NM_010834 | 2008 | AAGGCAGCCAAACAGU | 1325 | ACTGCTGCATCTTAAAAGGCAGC | 1237 |
| | | AUUC | | CAAACAGTATTCATTTTTTAAT | |
| NM_010834 | 2057 | UCUGCCUUUAUCACAU | 1326 | ATTTCAAAATCACTGTCTGCCTT | 1238 |
| | | GGCA | | TATCACATGGCAATTTTGTGGT | |
| NM_010834 | 2093 | AUGGAAAUGACUGGUU | 1327 | TTTTGTGGTAAAATAATGGAAAT | 1239 |
| | | CUAU | | GACTGGTTCTATCAATATTGTA | |
| NM_010834 | 2126 | AAGACUCUGAAACAAU | 1328 | ATCAATATTGTATAAAAGACTCT | 1240 |
| | | UACA | | GAAACAATTACATTTATATAAT | |
| NM_010834 | 2131 | UCUGAAACAAUUACAU | 1329 | TATTGTATAAAAGACTCTGAAAC | 1241 |
| | | UUAU | | AATTACATTTATATAATATGTA | |
| NM_010834 | 2132 | CUGAAACAAUUACAUU | 1330 | ATTGTATAAAAGACTCTGAAACA | 1242 |
| | | UAUA | | ATTACATTTATATAATATGTAT | |
| NM_010834 | 2133 | UGAAACAAUUACAUUU | 1331 | TTGTATAAAAGACTCTGAAACAA | 1243 |
| | | AUAU | | TTACATTTATATAATATGTATA | |
| NM_010834 | 2143 | ACAUUUAUAUAAUAUG | 1332 | GACTCTGAAACAATTACATTTAT | 1244 |
| | | UAUA | | ATAATATGTATACAATATTGTT | |
| NM_010834 | 2151 | AUAAUAUGUAUACAAU | 1333 | AACAATTACATTTATATAATATG | 1245 |
| | | AUUG | | TATACAATATTGTTTTGTAAAT | |
| NM_010834 | 2152 | UAAUAUGUAUACAAUA | 1334 | ACAATTACATTTATATAATATGT | 1246 |
| | | UUGU | | ATACAATATTGTTTTGTAAATA | |
| NM_010834 | 2155 | UAUGUAUACAAUAUUG | 1335 | ATTACATTTATATAATATGTATA | 1247 |
| | | UUUU | | CAATATTGTTTTGTAAATAAGT | |
| NM_010834 | 2169 | UGUUUUGUAAAUAAGU | 1336 | ATATGTATACAATATTGTTTTGT | 1248 |
| | | GUCU | | AAATAAGTGTCTCCTTTTATAT | |
| NM_010834 | 2171 | UUUUGUAAAUAAGUGU | 1337 | ATGTATACAATATTGTTTTGTAA | 1249 |
| | | CUCC | | ATAAGTGTCTCCTTTTATATTT | |
| NM_010834 | 2172 | UUUGUAAAUAAGUGUC | 1338 | TGTATACAATATTGTTTTGTAAA | 1250 |
| | | UCCU | | TAAGTGTCTCCTTTTATATTTA | |
| NM_010834 | 2173 | UUGUAAAUAAGUGUCU | 1339 | GTATACAATATTGTTTTGTAAAT | 1251 |
| | | CCUU | | AAGTGTCTCCTTTTATATTTAC | |
| NM_010834 | 2175 | GUAAAUAAGUGUCUCC | 1340 | ATACAATATTGTTTTGTAAATAA | 1252 |
| | | UUUU | | GTGTCTCCTTTTATATTTACTT | |
| NM_010834 | 2213 | UUUUACACUAAUGAAA | 1341 | TTTACTTTGGTATATTTTTACAC | 1253 |
| | | UUUC | | TAATGAAATTTCAAATCATTAA | |
| NM_010834 | 2214 | UUUACACUAAUGAAAU | 1342 | TTACTTTGGTATATTTTTACACT | 1254 |
| | | UUCA | | AATGAAATTTCAAATCATTAAA | |
| NM_010834 | 2215 | UUACACUAAUGAAAUU | 1343 | TACTTTGGTATATTTTTACACTA | 1255 |
| | | UCAA | | ATGAAATTTCAAATCATTAAAG | |
| NM_010834 | 2222 | AAUGAAAUUUCAAAUC | 1344 | GTATATTTTTACACTAATGAAAT | 1256 |
| | | AUUA | | TTCAAATCATTAAAGTACAAAG | |
| NM_010834 | 2232 | CAAAUCAUUAAAGUAC | 1345 | ACACTAATGAAATTTCAAATCAT | 1257 |
| | | AAAG | | TAAAGTACAAAGACATGTCATG | |
| NM_010834 | 2299 | AUUAGCAGAUUCAAUA | 1346 | TCTATTTCAGAGTGAATTAGCAG | 1258 |
| | | GUGG | | ATTCAATAGTGGTCTTAAAACT | |
| NM_010834 | 2301 | UAGCAGAUUCAAUAGU | 1347 | TATTTCAGAGTGAATTAGCAGAT | 1259 |
| | | GGUC | | TCAATAGTGGTCTTAAAACTCT | |
| NM_010834 | 2332 | UAUGUUAAGAUUAGAA | 1348 | GGTCTTAAAACTCTGTATGTTAA | 1260 |
| | | GGUU | | GATTAGAAGGTTATATTACAAT | |
| NM_010834 | 2335 | GUUAAGAUUAGAAGGU | 1349 | CTTAAAACTCTGTATGTTAAGAT | 1261 |
| | | UAUA | | TAGAAGGTTATATTACAATCAA | |
| NM_010834 | 2337 | UAAGAUUAGAAGGUUA | 1350 | TAAAACTCTGTATGTTAAGATTA | 1262 |
| | | UAUU | | GAAGGTTATATTACAATCAATT | |
| NM_010834 | 2346 | AAGGUUAUAUUACAAU | 1351 | GTATGTTAAGATTAGAAGGTTAT | 1263 |
| | | CAAU | | ATTACAATCAATTTATGTATTT | |
| NM_010834 | 2348 | GGUUAUAUUACAAUCA | 1352 | ATGTTAAGATTAGAAGGTTATAT | 1264 |
| | | AUUU | | TACAATCAATTTATGTATTTTT | |
| NM_010834 | 2350 | UUAUAUUACAAUCAAU | 1353 | GTTAAGATTAGAAGGTTATATTA | 1265 |
| | | UUAU | | CAATCAATTTATGTATTTTTTA | |
| NM_010834 | 2353 | UAUUACAAUCAAUUUA | 1354 | AAGATTAGAAGGTTATATTACAA | 1266 |
| | | UGUA | | TCAATTTATGTATTTTTTACAT | |
| NM_010834 | 2354 | AUUACAAUCAAUUUAU | 1355 | AGATTAGAAGGTTATATTACAAT | 1267 |
| | | GUAU | | CAATTTATGTATTTTTTACATT | |
| NM_010834 | 2376 | UUUACAUUAUCAACAU | 1356 | TCAATTTATGTATTTTTTACATT | 1268 |
| | | UCAC | | ATCAACATTCACTTATGGTTTC | |
| NM_010834 | 2478 | UACUAAACAUACCAAC | 1357 | AAAAATTACAAGCATTACTAAAC | 1269 |
| | | AUGU | | ATACCAACATGTATCTAAAGAA | |
| NM_010834 | 2480 | CUAAACAUACCAACAU | 1358 | AAATTACAAGCATTACTAAACAT | 1270 |
| | | GUAU | | ACCAACATGTATCTAAAGAAAT | |
| NM_010834 | 2488 | ACCAACAUGUAUCUAA | 1359 | AGCATTACTAAACATACCAACAT | 1271 |
| | | AGAA | | GTATCTAAAGAAATACAAATAT | |
| NM_010834 | 2507 | AAUACAAAUAUGGUAU | 1360 | ACATGTATCTAAAGAAATACAAA | 1272 |
| | | CUCA | | TATGGTATCTCAATAACAGCTA | |
| NM_010834 | 2515 | UAUGGUAUCUCAAUAA | 1361 | CTAAAGAAATACAAATATGGTAT | 1273 |
| | | CAGC | | CTCAATAACAGCTACTTTTTTA | |
| NM_010834 | 2520 | UAUCUCAAUAACAGCU | 1362 | GAAATACAAATATGGTATCTCAA | 1274 |
| | | ACUU | | TAACAGCTACTTTTTTATTTTA | |
| NM_010834 | 2521 | AUCUCAAUAACAGCUA | 1363 | AAATACAAATATGGTATCTCAAT | 1275 |
| | | CUUU | | AACAGCTACTTTTTTATTTTAT | |
| NM_010834 | 2522 | UCUCAAUAACAGCUAC | 1364 | AATACAAATATGGTATCTCAATA | 1276 |
| | | UUUU | | ACAGCTACTTTTTTATTTTATA | |
| NM_010834 | 2546 | UUUAUAAUUUGACAAU | 1365 | CAGCTACTTTTTTATTTTATAAT | 1277 |
| | | GAAU | | TTGACAATGAATACATTTCTTT | |
| NM_010834 | 2553 | UUUGACAAUGAAUACA | 1366 | TTTTTTATTTTATAATTTGACAA | 1278 |
| | | UUUC | | TGAATACATTTCTTTTATTTAC | |
| NM_010834 | 2554 | UUGACAAUGAAUACAU | 1367 | TTTTTATTTTATAATTTGACAAT | 1279 |
| | | UUCU | | GAATACATTTCTTTTATTTACT | |
| NM_010834 | 2555 | UGACAAUGAAUACAUU | 1368 | TTTTATTTTATAATTTGACAATG | 1280 |
| | | UCUU | | AATACATTTCTTTTATTTACTT | |
| NM_010834 | 2588 | UUUUAUAAAUUGGAAC | 1369 | TTTTATTTACTTCAGTTTTATAA | 1281 |
| | | UUUG | | ATTGGAACTTTGTTTATCAAAT | |
| NM_010834 | 2589 | UUUAUAAAUUGGAACU | 1370 | TTTATTTACTTCAGTTTTATAAA | 1282 |
| | | UUGU | | TTGGAACTTTGTTTATCAAATG | |
| NM_010834 | 2590 | UUAUAAAUUGGAACUU | 1371 | TTATTTACTTCAGTTTTATAAAT | 1283 |
| | | UGUU | | TGGAACTTTGTTTATCAAATGT | |
| NM_010834 | 2598 | UGGAACUUUGUUUAUC | 1372 | TTCAGTTTTATAAATTGGAACTT | 1284 |
| | | AAAU | | TGTTTATCAAATGTATTGTACT | |
| NM_010834 | 2623 | GUACUCAUAGCUAAAU | 1373 | TTTATCAAATGTATTGTACTCAT | 1285 |
| | | GAAA | | AGCTAAATGAAATTATTTCTTA | |
| NM_010834 | 2629 | AUAGCUAAAUGAAAUU | 1374 | AAATGTATTGTACTCATAGCTAA | 1286 |
| | | AUUU | | ATGAAATTATTTCTTACATAAA | |
| NM_010834 | 2631 | AGCUAAAUGAAAUUAU | 1375 | ATGTATTGTACTCATAGCTAAAT | 1287 |
| | | UUCU | | GAAATTATTTCTTACATAAAAA | |

[0086] In some embodiments, a target region of a human MSTN specific siRNA comprises the nucleic acid sequence of any one of SEQ ID NOs: 1376-1472. In some embodiments, a target region of a mouse Mstn specific siRNA comprises the nucleic acid sequence of any one of SEQ ID NOs: 1200-1287.

[0087] In some embodiments, a human MSTN specific siRNA described herein comprises a region of complementarity to at least 8, at least 9, at least 10, at least 11, at least 12, at least 13, at least 14, at least 15, at least 16, at least 17, at least 18 at least 19, at least 20, at least 21, at least 22, at least 23, at least 24, at least 25, or more consecutive nucleotides to a human MSTN target nucleic acid sequence as set forth in SEQ ID NOs: 1376-1472. In some embodiments, a human MSTN specific siRNA described herein comprises a region of complementarity to at least 8, at least 9, at least 10, at least 11, at least 12, at least 13, at least 14, at least 15, at least 16, at least 17, at least 18 at least 19, at least 20, at least 21, at least 22, at least 23, at least 24, at least 25, or more consecutive nucleotides of to a human MSTN target nucleic acid sequence as set forth in SEQ ID NOs: 1376-1472, except for at least 1, at least 2, at least 3, at least 4, or at least 5 mismatch within the region of complementarity to the nucleotide sequence of SEQ ID NOs: 1376-1472.

[0088] In some embodiments, a mouse Mstn specific siRNA described herein comprises a region of complementarity to at least 8, at least 9, at least 10, at least 11, at least 12, at least 13, at least 14, at least 15, at least 16, at least 17, at least 18 at least 19, at least 20, at least 21, at least 22, at least 23, at least 24, at least 25, or more consecutive nucleotides to a mouse Mstn target nucleic acid sequence as set forth in SEQ ID NOs: 1200-1287. In some embodiments, a mouse Mstn specific siRNA described herein comprises a region of complementarity to at least 8, at least 9, at least 10, at least 11, at least 12, at least 13, at least 14, at least 15, at least 16, at least 17, at least 18 at least 19, at least 20, at least 21, at least 22, at least 23, at least 24, at least 25, or more consecutive nucleotides of to a mouse Mstn target nucleic acid sequence as set forth in SEQ ID NOs: 1200-1287, except for at least 1, at least 2, at least 3, at least 4, or at least 5 mismatch within the region of complementarity to the nucleotide sequence of SEQ ID NOs: 1200-1287.

[0089] In some embodiments, a human MSTN specific siRNA may be at least 80%, at least 85%, at least 90%, at least 91%, at least 92%, at least 93%, at least 94%, at least 95%, at least 96%, at least 97%, at least 98%, at least 99% or 100% complementary to any one of SEQ ID NOs: 1473-1569. In some embodiments, a complementary nucleotide sequence need not be 100% complementary to that of a human MSTN target sequence to be specifically hybridizable or specific for an MSTN. In some embodiments, the antisense strand of a human MSTN specific siRNA is fully complementarity with all or a portion of its target sequence. In some embodiments, the antisense strand of a human MSTN specific siRNA includes 1, 2, 3, or more mismatches to the target sequence. In some embodiments, a human MSTN specific siRNA comprises an antisense strand comprising a nucleotide sequence that is complementary (e.g., at least 85%, at least 90%, at least 95%, at least 96%, at least 97%, at least 98%, at least 99%, or 100%) to a target RNA sequence as set forth in any one of SEQ ID NOs: 1473-1569. In some embodiments, a human MSTN specific siRNA comprises an antisense strand comprising a nucleic acid sequence that is complementary to at least 6, at least 7, at least 8, at least 9, at least 10, at least 11, at least 12, at least 13, at least 14, at least 15, at least 16, at least 17, at least 18, at least 19, at least 20, at least 21, at least 22, at least 23, at least 24, at least 25, or more consecutive nucleotides of the sequence as set forth in any one of SEQ ID NOs: 1473-1569. In some embodiments, a human MSTN specific siRNA comprises an antisense strand comprising a nucleic acid sequence that is complementary the sequence as set forth in any one of SEQ ID NOs: 1473-1569.

[0090] In some embodiments, a mouse Mstn specific siRNA may be at least 80%, at least 85%, at least 90%, at least 91%, at least 92%, at least 93%, at least 94%, at least 95%, at least 96%, at least 97%, at least 98%, at least 99% or 100% complementary to any one of SEQ ID NOs: 1288-1375. In some embodiments, a complementary nucleotide sequence need not be 100% complementary to that of a mouse Mstn target sequence to be specifically hybridizable or specific for a mouse Mstn. In some embodiments, the antisense strand of a mouse Mstn specific siRNA is fully complementarity with all or a portion of its target sequence. In some embodiments, the antisense strand of a mouse Mstn specific siRNA includes 1, 2, 3, or more mismatches to the target sequence. In some embodiments, a mouse Mstn specific siRNA comprises an antisense strand comprising a nucleotide sequence that is complementary (e.g., at least 85%, at least 90%, at least 95%, at least 96%, at least 97%, at least 98%, at least 99%, or 100%) to a target RNA sequence as set forth in any one of SEQ ID NOs: 1288-1375. In some embodiments, a mouse Mstn specific siRNA comprises an antisense strand comprising a nucleic acid sequence that is complementary to at least 6, at least 7, at least 8, at least 9, at least 10, at least 11, at least 12, at least 13, at least 14, at least 15, at least 16, at least 17, at least 18, at least 19, at least 20, at least 21, at least 22, at least 23, at least 24, at least 25, or more consecutive nucleotides of the sequence as set forth in any one of SEQ ID NOs: 1288-1375. In some embodiments, a mouse Mstn specific siRNA comprises an antisense strand comprising a nucleic acid sequence that is complementary the sequence as set forth in any one of SEQ ID NOs: 1288-1375.

[0091] Exemplary MSTN specific siRNA sequences (both antisense and sense strand) are set forth in Tables 13 and 14.

TABLE 13
Exemplary mouse Mstn specific siRNA sequences

| Accession | | | SEQ | | SEQ |
|---|---|---|---|---|---|
| number | Position | Sense Strand | ID NO | Antisense Strand | ID NO |
| NM_010834 | 78 | AGAAAUAAGAACAAGA | 1658 | UCUUGUUCUUAUUUCUUCUUU | 1570 |
| NM_010834 | 242 | UAAUGCAUGUGCGUGA | 1659 | UCACGCACAUGCAUUACACUU | 1571 |
| NM_010834 | 277 | CCAGAAUAGAAGCCAA | 1660 | UUGGCUUCUAUUCUGGAGUUU | 1572 |
| NM_010834 | 523 | GCAAGCCCAAAUGUUA | 1661 | UAACAUUUGGGCUUGCCAUUU | 1573 |
| NM_010834 | 524 | CAAGCCCAAAUGUUGA | 1662 | UCAACAUUUGGGCUUGCCAUU | 1574 |
| NM_010834 | 618 | ACUCCUACAACAGUGA | 1663 | UCACUGUUGUAGGAGUCUUUU | 1575 |
| NM_010834 | 780 | CCUGAAUCCAACUUAA | 1664 | UUAAGUUGGAUUCAGGCUGUU | 1576 |
| NM_010834 | 1007 | AUGGGACUGGAUUAUA | 1665 | UAUAAUCCAGUCCCAUCCAUU | 1577 |
| NM_010834 | 1051 | GCUCAGGAGAGUGUGA | 1666 | UCACACUCUCCUGAGCAGUUU | 1578 |
| NM_010834 | 1057 | GAGAGUGUGAAUUUGA | 1667 | UCAAAUUCACACUCUCCUGUU | 1579 |
| NM_010834 | 1058 | AGAGUGUGAAUUUGUA | 1668 | UACAAAUUCACACUCUCCUUU | 1580 |
| NM_010834 | 1168 | UUAAUAUGCUAUAUUA | 1669 | UAAUAUAGCAUAUUAAUGGUU | 1581 |
| NM_010834 | 1189 | GCAAAGAACAAAUAAA | 1670 | UUUAUUUGUUCUUUGCCAUUU | 1582 |
| NM_010834 | 1190 | CAAAGAACAAAUAAUA | 1671 | UAUUAUUUGUUCUUUGCCAUU | 1583 |
| NM_010834 | 1192 | AAGAACAAAUAAUAA | 1672 | UUAUUAUUUGUUCUUUGCCU | 1584 |
| NM_010834 | 1262 | UUAGGUUAGAAAUUUA | 1673 | UAAAUUUCUAACCUAAUGCUU | 1585 |
| NM_010834 | 1325 | GCACCACAGGCUGUAA | 1674 | UUACAGCCUGUGGUGCUUGUU | 1586 |
| NM_010834 | 1370 | CAAGCUACAGUGUAUA | 1675 | UAUACACUGUAGCUUGUGCUU | 1587 |
| NM_010834 | 1416 | GCAUUCAACCACCAAA | 1676 | UUUGGUGGUUGAAUGCCAAUU | 1588 |
| NM_010834 | 1449 | AUGUUGUAUGAUUUCA | 1677 | UGAAAUCAUACAACAUCCUUU | 1589 |
| NM_010834 | 1454 | GUAUGAUUUCCAGAGA | 1678 | UCUCUGGAAAUCAUACAACUU | 1590 |
| NM_010834 | 1485 | AGAUCAAAUUACAUUA | 1679 | UAAUGUAAUUUGAUCUCCAUU | 1591 |
| NM_010834 | 1489 | CAAAUUACAUUUAUGA | 1680 | UCAUAAAUGUAAUUUGAUCUU | 1592 |
| NM_010834 | 1600 | UUAUUUCCUAACAGUA | 1681 | UACUGUUAGGAAAUAAGACUU | 1593 |
| NM_010834 | 1602 | AUUUCCUAACAGUUUA | 1682 | UAAACUGUUAGGAAAUAAGUU | 1594 |
| NM_010834 | 1603 | UUUCCUAACAGUUUCA | 1683 | UGAAACUGUUAGGAAAUAAUU | 1595 |
| NM_010834 | 1632 | GAAGAAUCUAUAUGUA | 1684 | UACAUAUAGAUUCUUCCGUUU | 1596 |
| NM_010834 | 1633 | AAGAAUCUAUAUGUAA | 1685 | UUACAUAUAGAUUCUUCCGUU | 1597 |
| NM_010834 | 1635 | GAAUCUAUAUGUAGCA | 1686 | UGCUACAUAUAGAUUCUUCUU | 1598 |
| NM_010834 | 1656 | AAAGUGUAGGAUUGUA | 1687 | UACAAUCCUACACUUUACAUU | 1599 |
| NM_010834 | 1657 | AAGUGUAGGAUUGUUA | 1688 | UAACAAUCCUACACUUUACUU | 1600 |
| NM_010834 | 1691 | UACACUUAUAUUUGUA | 1689 | UACAAAUAUAAGUGUACAUUU | 1601 |
| NM_010834 | 1696 | UUAUAUUUGUAUUGUA | 1690 | UACAAUACAAAUAUAAGUGUU | 1602 |
| NM_010834 | 1704 | GUAUUGUAUACUUGGA | 1691 | UCCAAGUAUACAAUACAAAUU | 1603 |
| NM_010834 | 1705 | UAUUGUAUACUUGGUA | 1692 | UACCAAGUAUACAAUACAAUU | 1604 |
| NM_010834 | 1733 | ACAAAGUAGGAAUGGA | 1693 | UCCAUUCCUACUUUGUGGAUU | 1605 |
| NM_010834 | 1928 | GGAAAGAAGAAUCUUA | 1694 | UAAGAUUCUUCUUUCCUUAUU | 1606 |
| NM_010834 | 2008 | CAGCCAAACAGUAUUA | 1695 | UAAUACUGUUUGGCUGCCUUU | 1607 |
| NM_010834 | 2057 | CCUUUAUCACAUGGCA | 1696 | UGCCAUGUGAUAAAGGCAGUU | 1608 |
| NM_010834 | 2093 | AAAUGACUGGUUCUAA | 1697 | UUAGAACCAGUCAUUUCCAUU | 1609 |
| NM_010834 | 2126 | CUCUGAAACAAUUACA | 1698 | UGUAAUUGUUUCAGAGUCUUU | 1610 |
| NM_010834 | 2131 | AAACAAUUACAUUUAA | 1699 | UUAAAUGUAAUUGUUUCAGUU | 1611 |
| NM_010834 | 2132 | AACAAUUACAUUUAUA | 1700 | UAUAAAUGUAAUUGUUUCAUU | 1612 |
| NM_010834 | 2133 | ACAAUUACAUUUAUAA | 1701 | UUAUAAAUGUAAUUGUUUCUU | 1613 |
| NM_010834 | 2143 | UUAUAUAAUAUGUAUA | 1702 | UAUACAUAUUAUAUAAAUGUU | 1614 |
| NM_010834 | 2151 | UAUGUAUACAAUAUUA | 1703 | UAAUAUUGUAUACAUAUUAUU | 1615 |
| NM_010834 | 2152 | AUGUAUACAAUAUUGA | 1704 | UCAAUAUUGUAUACAUAUUUU | 1616 |
| NM_010834 | 2155 | UAUACAAUAUUGUUUA | 1705 | UAAACAAUAUUGUAUACAUUU | 1617 |
| NM_010834 | 2169 | UUGUAAAUAAGUGUCA | 1706 | UGACACUUAUUUACAAAACUU | 1618 |
| NM_010834 | 2171 | GUAAAUAAGUGUCUCA | 1707 | UGAGACACUUAUUUACAAAUU | 1619 |
| NM_010834 | 2172 | UAAAUAAGUGUCUCCA | 1708 | UGGAGACACUUAUUUACAAUU | 1620 |
| NM_010834 | 2173 | AAAUAAGUGUCUCCUA | 1709 | UAGGAGACACUUAUUUACAUU | 1621 |
| NM_010834 | 2175 | AUAAGUGUCUCCUUUA | 1710 | UAAAGGAGACACUUAUUUAUU | 1622 |
| NM_010834 | 2213 | ACACUAAUGAAAUUUA | 1711 | UAAAUUUCAUUAGUGUAAAUU | 1623 |
| NM_010834 | 2214 | CACUAAUGAAAUUUCA | 1712 | UGAAAUUUCAUUAGUGUAAUU | 1624 |
| NM_010834 | 2215 | ACUAAUGAAAUUUCAA | 1713 | UUGAAAUUUCAUUAGUGUAUU | 1625 |
| NM_010834 | 2222 | AAAUUUCAAAUCAUUA | 1714 | UAAUGAUUUGAAAUUUCAUUU | 1626 |
| NM_010834 | 2232 | UCAUUAAAGUACAAAA | 1715 | UUUUGUACUUUAAUGAUUUUU | 1627 |
| NM_010834 | 2299 | GCAGAUUCAAUAGUGA | 1716 | UCACUAUUGAAUCUGCUAAUU | 1628 |
| NM_010834 | 2301 | AGAUUCAAUAGUGGUA | 1717 | UACCACUAUUGAAUCUGCUUU | 1629 |
| NM_010834 | 2332 | UUAAGAUUAGAAGGUA | 1718 | UACCUUCUAAUCUUAACAUUU | 1630 |
| NM_010834 | 2335 | AGAUUAGAAGGUUAUA | 1719 | UAUAACCUUCUAAUCUUAAUU | 1631 |
| NM_010834 | 2337 | AUUAGAAGGUUAUAUA | 1720 | UAUAUAACCUUCUAAUCUUUU | 1632 |
| NM_010834 | 2346 | UUAUAUUACAAUCAAA | 1721 | UUUGAUUGUAAUAUAACCUUU | 1633 |
| NM_010834 | 2348 | AUAUUACAAUCAAUUA | 1722 | UAAUUGAUUGUAAUAUAACUU | 1634 |
| NM_010834 | 2350 | AUUACAAUCAAUUUAA | 1723 | UUAAAUUGAUUGUAAUAUAUU | 1635 |
| NM_010834 | 2353 | ACAAUCAAUUUAUGUA | 1724 | UACAUAAAUUGAUUGUAAUUU | 1636 |
| NM_010834 | 2354 | CAAUCAAUUUAUGUAA | 1725 | UUACAUAAAUUGAUUGUAAUU | 1637 |
| NM_010834 | 2376 | CAUUAUCAACAUUCAA | 1726 | UUGAAUGUUGAUAAUGUAAUU | 1638 |
| NM_010834 | 2478 | AAACAUACCAACAUGA | 1727 | UCAUGUUGGUAUGUUUAGUUU | 1639 |
| NM_010834 | 2480 | ACAUACCAACAUGUAA | 1728 | UUACAUGUUGGUAUGUUUAUU | 1640 |
| NM_010834 | 2488 | ACAUGUAUCUAAAGAA | 1729 | UUCUUUAGAUACAUGUUGGUU | 1641 |
| NM_010834 | 2507 | CAAAUAUGGUAUCUCA | 1730 | UGAGAUACCAUAUUUGUAUUU | 1642 |
| NM_010834 | 2515 | GUAUCUCAAUAACAGA | 1731 | UCUGUUAUUGAGAUACCAUUU | 1643 |
| NM_010834 | 2520 | UCAAUAACAGCUACUA | 1732 | UAGUAGCUGUUAUUGAGAUUU | 1644 |
| NM_010834 | 2521 | CAAUAACAGCUACUUA | 1733 | UAAGUAGCUGUUAUUGAGAUU | 1645 |
| NM_010834 | 2522 | AAUAACAGCUACUUUA | 1734 | UAAAGUAGCUGUUAUUGAGUU | 1646 |
| NM_010834 | 2546 | UAAUUUGACAAUGAAA | 1735 | UUUCAUUGUCAAAUUAUAAUU | 1647 |
| NM_010834 | 2553 | ACAAUGAAUACAUUUA | 1736 | UAAAUGUAUUCAUUGUCAAUU | 1648 |
| NM_010834 | 2554 | CAAUGAAUACAUUUCA | 1737 | UGAAAUGUAUUCAUUGUCAUU | 1649 |
| NM_010834 | 2555 | AAUGAAUACAUUUCUA | 1738 | UAGAAAUGUAUUCAUUGUCUU | 1650 |
| NM_010834 | 2588 | AUAAAUUGGAACUUUA | 1739 | UAAAGUUCCAAUUUAUAAAUU | 1651 |
| NM_010834 | 2589 | UAAAUUGGAACUUUGA | 1740 | UCAAAGUUCCAAUUUAUAAUU | 1652 |
| NM_010834 | 2590 | AAAUUGGAACUUUGUA | 1741 | UACAAAGUUCCAAUUUAUAUU | 1653 |
| NM_010834 | 2598 | ACUUUGUUUAUCAAAA | 1742 | UUUUGAUAAACAAAGUUCCUU | 1654 |
| NM_010834 | 2623 | UCAUAGCUAAAUGAAA | 1743 | UUUCAUUUAGCUAUGAGUAUU | 1655 |
| NM_010834 | 2629 | CUAAAUGAAAUUAUUA | 1744 | UAAUAAUUUCAUUUAGCUAUU | 1656 |
| NM_010834 | 2631 | AAAUGAAAUUAUUUCA | 1745 | UGAAAUAAUUUCAUUUAGCUU | 1657 |

TABLE 14
Exemplary human MSTN specific siRNA sequences

| Accession | | | SEQ ID | | SEQ ID |
|---|---|---|---|---|---|
| number | Position | Sense Strand | NO | Antisense Strand | NO |
| NM_005259 | 246 | UAAUGCAUGUACUUGA | 1843 | UCAAGUACAUGCAUUACACUU | 1746 |
| NM_005259 | 284 | GAAUAGAAGCCAUUAA | 1844 | UUAAUGGCUUCUAUUCUUGUU | 1747 |
| NM_005259 | 296 | UUAAGAUACAAAUCCA | 1845 | UGGAUUUGUAUCUUAAUGGUU | 1748 |
| NM_005259 | 344 | UCAGCAAAGAUGUUAA | 1846 | UUAACAUCUUUGCUGAUGUUU | 1749 |
| NM_005259 | 542 | GCUUCUUUAAAUUUAA | 1847 | UUAAAUUUAAAGAAGCAACUU | 1750 |
| NM_005259 | 585 | AAAGGCCCAACUAUGA | 1848 | UCAUAGUUGGGCCUUUACUUU | 1751 |
| NM_005259 | 622 | ACUCCUACAACAGUGA | 1849 | UCACUGUUGUAGGAGUCUCUU | 1752 |
| NM_005259 | 626 | CUACAACAGUGUUUGA | 1850 | UCAAACACUGUUGUAGGAGUU | 1753 |
| NM_005259 | 752 | UGAAGACAGUGUUGCA | 1851 | UGCAACACUGUCUUCACAUUU | 1754 |
| NM_005259 | 959 | CAGAAUCACGAUGCUA | 1852 | UAGCAUCGUGAUUCUGUUGUU | 1755 |
| NM_005259 | 1011 | AUGGGAUUGGAUUAUA | 1853 | UAUAAUCCAAUCCCAUCCAUU | 1756 |
| NM_005259 | 1015 | GAUUGGAUUAUCGCUA | 1854 | UAGCGAUAAUCCAAUCCCAUU | 1757 |
| NM_005259 | 1055 | GCUCUGGAGAGUGUGA | 1855 | UCACACUCUCCAGAGCAGUUU | 1758 |
| NM_005259 | 1061 | GAGAGUGUGAAUUUGA | 1856 | UCAAAUUCACACUCUCCAGUU | 1759 |
| NM_005259 | 1062 | AGAGUGUGAAUUUGUA | 1857 | UACAAAUUCACACUCUCCAUU | 1760 |
| NM_005259 | 1168 | CCAAUUAAUAUGCUAA | 1858 | UUAGCAUAUUAAUUGGAGAUU | 1761 |
| NM_005259 | 1169 | CAAUUAAUAUGCUAUA | 1859 | UAUAGCAUAUUAAUUGGAGUU | 1762 |
| NM_005259 | 1172 | UUAAUAUGCUAUAUUA | 1860 | UAAUAUAGCAUAUUAAUUGUU | 1763 |
| NM_005259 | 1193 | GCAAAGAACAAAUAAA | 1861 | UUUAUUUGUUCUUUGCCAUUU | 1764 |
| NM_005259 | 1194 | CAAAGAACAAAUAAUA | 1862 | UAUUAUUUGUUCUUUGCCAUU | 1765 |
| NM_005259 | 1196 | AAGAACAAAUAAUAA | 1863 | UUAUUAUUUGUUCUUUGCCU | 1766 |
| NM_005259 | 1377 | CAUAAGCUACAGUAUA | 1864 | UAUACUGUAGCUUAUGCUUUU | 1767 |
| NM_005259 | 1409 | AUAUAUGCAAUGGUUA | 1865 | UAACCAUUGCAUAUAUUCCUU | 1768 |
| NM_005259 | 1464 | UGAUUUCCAGAGUUUA | 1866 | UAAACUCUGGAAAUCAUAAUU | 1769 |
| NM_005259 | 1482 | AGCUAGAAGGAGAUCA | 1867 | UGAUCUCCUUCUAGCUCAAUU | 1770 |
| NM_005259 | 1483 | GCUAGAAGGAGAUCAA | 1868 | UUGAUCUCCUUCUAGCUCAUU | 1771 |
| NM_005259 | 1495 | UCAAAUUACAUUUAUA | 1869 | UAUAAAUGUAAUUUGAUCUUU | 1772 |
| NM_005259 | 1498 | AAUUACAUUUAUGUUA | 1870 | UAACAUAAAUGUAAUUUGAUU | 1773 |
| NM_005259 | 1500 | UUACAUUUAUGUUCCA | 1871 | UGGAACAUAAAUGUAAUUUUU | 1774 |
| NM_005259 | 1502 | ACAUUUAUGUUCCUAA | 1872 | UUAGGAACAUAAAUGUAAUUU | 1775 |
| NM_005259 | 1516 | AUAUAUUACAACAUCA | 1873 | UGAUGUUGUAAUAUAUAGGUU | 1776 |
| NM_005259 | 1538 | AAAUGAAAGCGAUUCA | 1874 | UGAAUCGCUUUCAUUUCCUUU | 1777 |
| NM_005259 | 1568 | GAAUUAAAGGAGUAUA | 1875 | UAUACUCCUUUAAUUCAUCUU | 1778 |
| NM_005259 | 1583 | GCUUUAAAGUCUAUUA | 1876 | UAAUAGACUUUAAAGCAUAUU | 1779 |
| NM_005259 | 1589 | AAGUCUAUUUCUUUAA | 1877 | UUAAAGAAAUAGACUUUAAUU | 1780 |
| NM_005259 | 1595 | AUUUCUUUAAAGUUUA | 1878 | UAAACUUUAAAGAAAUAGAUU | 1781 |
| NM_005259 | 1663 | UUAUAUACCAUCAUUA | 1879 | UAAUGAUGGUAUAUAACAAUU | 1782 |
| NM_005259 | 1663 | AUAUAUUUCUGCAUUA | 1880 | UAAUGCAGAAAUAUAUUCAUU | 1783 |
| NM_005259 | 1682 | UCAUCCUUAAACACUA | 1881 | UAGUGUUUAAGGAUGAUUCUU | 1784 |
| NM_005259 | 1691 | AACACUUGAAUUUAUA | 1882 | UAUAAAUUCAAGUGUUUAAUU | 1785 |
| NM_005259 | 1694 | ACUUGAAUUUAUAUUA | 1883 | UAAUAUAAAUUCAAGUGUUUU | 1786 |
| NM_005259 | 1698 | GAAUUUAUAUUGUAUA | 1884 | UAUACAAUAUAAAUUCAAGUU | 1787 |
| NM_005259 | 1753 | AUGGUGCAGCAUAUGA | 1885 | UCAUAUGCUGCACCAUCCCUU | 1788 |
| NM_005259 | 1761 | GCAUAUGCAAUUUCCA | 1886 | UGGAAAUUGCAUAUGCUGCUU | 1789 |
| NM_005259 | 2010 | AAACUGCAUUAUCUUA | 1887 | UAAGAUAAUGCAGUUUCUCUU | 1790 |
| NM_005259 | 2080 | AGAAGUAUGUAAUUUA | 1888 | UAAAUUACAUACUUCUCCAUU | 1791 |
| NM_005259 | 2119 | CCUUUGCAACACUGCA | 1889 | UGCAGUGUUGCAAAGGCAGUU | 1792 |
| NM_005259 | 2124 | GCAACACUGCAGUUUA | 1890 | UAAACUGCAGUGUUGCAAAUU | 1793 |
| NM_005259 | 2155 | GAAAUGAUCGACUCUA | 1891 | UAGAGUCGAUCAUUUCUAUUU | 1794 |
| NM_005259 | 2156 | AAAUGAUCGACUCUAA | 1892 | UUAGAGUCGAUCAUUUCUAUU | 1795 |
| NM_005259 | 2164 | GACUCUAUCAAUAUUA | 1893 | UAAUAUUGAUAGAGUCGAUUU | 1796 |
| NM_005259 | 2168 | CUAUCAAUAUUGUAUA | 1894 | UAUACAAUAUUGAUAGAGUUU | 1797 |
| NM_005259 | 2188 | GACUGAAACAAUGCAA | 1895 | UUGCAUUGUUUCAGUCUUUUU | 1798 |
| NM_005259 | 2193 | AAACAAUGCAUUUAUA | 1896 | UAUAAAUGCAUUGUUUCAGUU | 1799 |
| NM_005259 | 2195 | ACAAUGCAUUUAUAUA | 1897 | UAUAUAAAUGCAUUGUUUCUU | 1800 |
| NM_005259 | 2196 | CAAUGCAUUUAUAUAA | 1898 | UUAUAUAAAUGCAUUGUUUUU | 1801 |
| NM_005259 | 2209 | UAAUAUGUAUACAAUA | 1899 | UAUUGUAUACAUAUUAUAUUU | 1802 |
| NM_005259 | 2212 | UAUGUAUACAAUAUUA | 1900 | UAAUAUUGUAUACAUAUUAUU | 1803 |
| NM_005259 | 2216 | UAUACAAUAUUGUUUA | 1901 | UAAACAAUAUUGUAUACAUUU | 1804 |
| NM_005259 | 2230 | UUGUAAAUAAGUGUCA | 1902 | UGACACUUAUUUACAAAACUU | 1805 |
| NM_005259 | 2232 | GUAAAUAAGUGUCUCA | 1903 | UGAGACACUUAUUUACAAAUU | 1806 |
| NM_005259 | 2233 | UAAAUAAGUGUCUCCA | 1904 | UGGAGACACUUAUUUACAAUU | 1807 |
| NM_005259 | 2234 | AAAUAAGUGUCUCCUA | 1905 | UAGGAGACACUUAUUUACAUU | 1808 |
| NM_005259 | 2274 | ACACUAAGGACAUUUA | 1906 | UAAAUGUCCUUAGUGUAAAUU | 1809 |
| NM_005259 | 2276 | ACUAAGGACAUUUCAA | 1907 | UUGAAAUGUCCUUAGUGUAUU | 1810 |
| NM_005259 | 2283 | ACAUUUCAAAUUAAGA | 1908 | UCUUAAUUUGAAAUGUCCUUU | 1811 |
| NM_005259 | 2363 | GCAGAUUAAAUAGUGA | 1909 | UCACUAUUUAAUCUGCUAAUU | 1812 |
| NM_005259 | 2364 | CAGAUUAAAUAGUGGA | 1910 | UCCACUAUUUAAUCUGCUAUU | 1813 |
| NM_005259 | 2365 | AGAUUAAAUAGUGGUA | 1911 | UACCACUAUUUAAUCUGCUUU | 1814 |
| NM_005259 | 2397 | UAAUGAUUAGAUGGUA | 1912 | UACCAUCUAAUCAUUAACAUU | 1815 |
| NM_005259 | 2406 | GAUGGUUAUAUUACAA | 1913 | UUGUAAUAUAACCAUCUAAUU | 1816 |
| NM_005259 | 2411 | UUAUAUUACAAUCAUA | 1914 | UAUGAUUGUAAUAUAACCAUU | 1817 |
| NM_005259 | 2439 | ACAUGAUUAACAUUCA | 1915 | UGAAUGUUAAUCAUGUAAAUU | 1818 |
| NM_005259 | 2440 | CAUGAUUAACAUUCAA | 1916 | UUGAAUGUUAAUCAUGUAAUU | 1819 |
| NM_005259 | 2475 | GUAUAAAGUGAAUUUA | 1917 | UAAAUUCACUUUAUACAGCUU | 1820 |
| NM_005259 | 2491 | AAAUUUCAAUGGUUUA | 1918 | UAAACCAUUGAAAUUUCAAUU | 1821 |
| NM_005259 | 2493 | AUUUCAAUGGUUUACA | 1919 | UGUAAACCAUUGAAAUUUCUU | 1822 |
| NM_005259 | 2513 | UUGUGUUUAAAUCUCA | 1920 | UGAGAUUUAAACACAAUGAUU | 1823 |
| NM_005259 | 2519 | UUAAAUCUCAACGUUA | 1921 | UAACGUUGAGAUUUAAACAUU | 1824 |
| NM_005259 | 2521 | AAAUCUCAACGUUCCA | 1922 | UGGAACGUUGAGAUUUAAAUU | 1825 |
| NM_005259 | 2609 | AACUGAUGCUAUCUCA | 1923 | UGAGAUAGCAUCAGUUUAUUU | 1826 |
| NM_005259 | 2622 | UCAACAAUAACUGUUA | 1924 | UAACAGUUAUUGUUGAGAUUU | 1827 |
| NM_005259 | 2623 | CAACAAUAACUGUUAA | 1925 | UUAACAGUUAUUGUUGAGAUU | 1828 |
| NM_005259 | 2649 | UAAUUUGAUAAUGAAA | 1926 | UUUCAUUAUCAAAUUAUAAUU | 1829 |
| NM_005259 | 2657 | UAAUGAAUAUAUUUCA | 1927 | UGAAAUAUAUUCAUUAUCAUU | 1830 |
| NM_005259 | 2658 | AAUGAAUAUAUUUCUA | 1928 | UAGAAAUAUAUUCAUUAUCUU | 1831 |
| NM_005259 | 2661 | GAAUAUAUUUCUGCAA | 1929 | UUGCAGAAAUAUAUUCAUUUU | 1832 |
| NM_005259 | 2671 | CUGCAUUUAUUUACUA | 1930 | UAGUAAAUAAAUGCAGAAAUU | 1833 |
| NM_005259 | 2675 | AUUUAUUUACUUCUGA | 1931 | UCAGAAGUAAAUAAAUGCAUU | 1834 |
| NM_005259 | 2711 | UAAUCAAAUUUAUUGA | 1932 | UCAAUAAAUUUGAUUAACAUU | 1835 |
| NM_005259 | 2733 | ACUAAAUGAAAUUAUA | 1933 | UAUAAUUUCAUUUAGUCAUUU | 1836 |
| NM_005259 | 2734 | CUAAAUGAAAUUAUUA | 1934 | UAAUAAUUUCAUUUAGUCAUU | 1837 |
| NM_005259 | 2750 | CUUACAUCUAAUUUGA | 1935 | UCAAAUUAGAUGUAAGAAAUU | 1838 |
| NM_005259 | 2753 | ACAUCUAAUUUGUAGA | 1936 | UCUACAAAUUAGAUGUAAGUU | 1839 |
| NM_005259 | 2765 | UAGAAACAGUAUAAGA | 1937 | UCUUAUACUGUUUCUACAAUU | 1840 |
| NM_005259 | 2767 | GAAACAGUAUAAGUUA | 1938 | UAACUUAUACUGUUUCUACUU | 1841 |
| NM_005259 | 2770 | ACAGUAUAAGUUAUAA | 1939 | UUAUAACUUAUACUGUUUCUU | 1842 |

[0092] In some embodiments, a mouse Mstn specific siRNA comprises an antisense strand that comprises at least 15 consecutive nucleosides of (e.g., at least 15, at least 16, at least 17, at least 18, at least 19, or at least 20) the sequence of any one of SEQ ID NOs: 1570-1657. In some embodiments, a mouse Mstn specific siRNA further comprises a sense strand that comprises at least 15 consecutive nucleosides (e.g., at least 15, at least 16, at least 17, at least 18, at least 19, or at least 20) complementary to the sequence of any one of SEQ ID NOs: 1570-1657. In some embodiments, a mouse Mstn siRNA further comprises a sense strand that comprises at least 15 consecutive nucleosides of (e.g., at least 15, at least 16, at least 17, at least 18, at least 19, or at least 20) the sequence of any one of SEQ ID NOs: 1658-1745.

[0093] In some embodiments, a mouse Mstn specific siRNA comprises an antisense strand that is at least 80% (e.g., at least 85%, at least 90%, at least 95%, at least 96%, at least 97%, at least 98%, at least 99%, or 100%) to the sequence of any one of SEQ ID NOs: 1570-1657. In some embodiments, a mouse Mstn specific siRNA further comprises a sense strand that comprises a complementary to a sequence at least 80% (e.g., at least 85%, at least 90%, at least 95%, at least 96%, at least 97%, at least 98%, at least 99%, or 100%) identical to the sequence of any one of SEQ ID NOs: 1570-1657. In some embodiments, a mouse Mstn specific siRNA further comprises a sense strand that is at least 80% (e.g., at least 85%, at least 90%, at least 95%, at least 96%, at least 97%, at least 98%, at least 99%, or 100%) identical to the sequence of any one of SEQ ID NOs: 1658-1745.

[0094] In some embodiments, a human MSTN specific siRNA comprises an antisense strand that comprises at least 15 consecutive nucleosides of (e.g., at least 15, at least 16, at least 17, at least 18, at least 19, or at least 20) the sequence of any one of SEQ ID NOs: 1746-1842. In some embodiments, a human MSTN specific siRNA further comprises a sense strand that comprises at least 15 consecutive nucleosides (e.g., at least 15, at least 16, at least 17, at least 18, at least 19, or at least 20) complementary to the sequence of any one of SEQ ID NOs: 1746-1842. In some embodiments, a human MSTN siRNA further comprises a sense strand that comprises at least 15 consecutive nucleosides of (e.g., at least 15, at least 16, at least 17, at least 18, at least 19, or at least 20) the sequence of any one of SEQ ID NOs: 1843-1939.

[0095] In some embodiments, a human MSTN specific siRNA comprises an antisense strand that is at least 80% (e.g., at least 85%, at least 90%, at least 95%, at least 96%, at least 97%, at least 98%, at least 99%, or 100%) to the sequence of any one of SEQ ID NOs: 1746-1842. In some embodiments, a human MSTN specific siRNA further comprises a sense strand that comprises a complementary to a sequence at least 80% (e.g., at least 85%, at least 90%, at least 95%, at least 96%, at least 97%, at least 98%, at least 99%, or 100%) identical to the sequence of any one of SEQ ID NOs: 1746-1842. In some embodiments, a human MSTN specific siRNA further comprises a sense strand that is at least 80% (e.g., at least 85%, at least 90%, at least 95%, at least 96%, at least 97%, at least 98%, at least 99%, or 100%) identical to the sequence of any one of SEQ ID NOs: 1843-1939.

[0096] In some embodiments, an MSTN specific siRNA described herein comprises at least one nucleoside modified at the 2′ position of the sugar. In some embodiments, an MSTN specific siRNA comprises at least one 2′-modified nucleoside. In some embodiments, all of the nucleosides in the oligonucleotide are 2′-modified nucleosides.

[0097] In some embodiments, an MSTN specific siRNA described herein comprises one or more non-bicyclic 2′-modified nucleosides, e.g., 2′-deoxy, 2′-fluoro (2′-F), 2′-O-methyl (2′-O-Me), 2′-O-methoxyethyl (2′-MOE), 2′-O-aminopropyl (2′-O-AP), 2′-O-dimethylaminoethyl (2′-O-DMAOE), 2′-O-dimethylaminopropyl (2′-O-DMAP), 2′-O-dimethylaminoethyloxyethyl (2′-O-DMAEOE), or 2′-O—N-methylacetamido (2′-O-NMA) modified nucleoside. In some embodiments, an MSTN specific siRNA comprises one or more 2′-O-methoxyethyl (2′-MOE) modified nucleoside and/or one or more 2′-fluoro (2′-F) modified nucleoside.

[0098] In some embodiments, an MSTN specific siRNA comprises one or more modified one or more modified internucleotide linkages. In some embodiments, the internucleotide linkage is a phosphorothioate linkage. In some embodiments, an MSTN specific siRNA further comprises a cholesterol molecule. In some embodiments, an MSTN specific siRNA is conjugated to the cholesterol by a TEG linker. In some embodiments, an MSTN specific siRNA is conjugated to a docosanoic acid (DCA). In some embodiments, the DCA is conjugated to the isolated nucleic acid via a cleavable linker. Exemplary an MSTN specific siRNA with chemical modifications are set forth in Tables 4 and 5.

TABLE 4
Modified mouse Mstn specific siRNA

| | SEQ |
|---|---|
| | ID |
| | NO |
| Sense Strand | |
| (mA)#(mG)#(mA)(fA)(mA)(fU)(mA)(fA)(mG)(fA)(mA)(mC)(mA)(fA)#(mG)#(mA)-TegChol | 285 |
| (mU)#(mA)#(mA)(fU)(mG)(fC)(mA)(fU)(mG)(fU)(mG)(mC)(mG)(fU)#(mG)#(mA)-TegChol | 286 |
| (mC)#(mC)#(mA)(fG)(mA)(fA)(mU)(fA)(mG)(fA)(mA)(mG)(mC)(fC)#(mA)#(mA)-TegChol | 287 |
| (mG)#(mC)#(mA)(fA)(mG)(fC)(mC)(fC)(mA)(fA)(mA)(mU)(mG)(fU)#(mU)#(mA)-TegChol | 288 |
| (mC)#(mA)#(mA)(fG)(mC)(fC)(mC)(fA)(mA)(fA)(mU)(mG)(mU)(fU)#(mG)#(mA)-TegChol | 289 |
| (mA)#(mC)#(mU)(fC)(mC)(fU)(mA)(fC)(mA)(fA)(mC)(mA)(mG)(fU)#(mG)#(mA)-TegChol | 290 |
| (mC)#(mC)#(mU)(fG)(mA)(fA)(mU)(fC)(mC)(fA)(mA)(mC)(mU)(fU)#(mA)#(mA)-TegChol | 291 |
| (mA)#(mU)#(mG)(fG)(mG)(fA)(mC)(fU)(mG)(fG)(mA)(mU)(mU)(fA)#(mU)#(mA)-TegChol | 292 |
| (mG)#(mC)#(mU)(fC)(mA)(fG)(mG)(fA)(mG)(fA)(mG)(mU)(mG)(fU)#(mG)#(mA)-TegChol | 293 |
| (mG)#(mA)#(mG)(fA)(mG)(fU)(mG)(fU)(mG)(fA)(mA)(mU)(mU)(fU)#(mG)#(mA)-TegChol | 294 |
| (mA)#(mG)#(mA)(fG)(mU)(fG)(mU)(fG)(mA)(fA)(mU)(mU)(mU)(fG)#(mU)#(mA)-TegChol | 295 |
| (mU)#(mU)#(mA)(fA)(mU)(fA)(mU)(fG)(mC)(fU)(mA)(mU)(mA)(fU)#(mU)#(mA)-TegChol | 296 |
| (mG)#(mC)#(mA)(fA)(mA)(fG)(mA)(fA)(mC)(fA)(mA)(mA)(mU)(fA)#(mA)#(mA)-TegChol | 297 |
| (mC)#(mA)#(mA)(fA)(mG)(fA)(mA)(fC)(mA)(fA)(mA)(mU)(mA)(fA)#(mU)#(mA)-TegChol | 298 |
| (fA)#(mA)#(fG)(mA)(fA)(mC)(fA)(mA)(fA)(mU)(fA)(mA)(fU)#(mA)#(fA)-TegChol | 299 |
| (mU)#(mU)#(mA)(fG)(mG)(fU)(mU)(fA)(mG)(fA)(mA)(mA)(mU)(fU)#(mU)#(mA)-TegChol | 300 |
| (mG)#(mC)#(mA)(fC)(mC)(fA)(mC)(fA)(mG)(fG)(mC)(mU)(mG)(fU)#(mA)#(mA)-TegChol | 301 |
| (mC)#(mA)#(mA)(fG)(mC)(fU)(mA)(fC)(mA)(fG)(mU)(mG)(mU)(fA)#(mU)#(mA)-TegChol | 302 |
| (mG)#(mC)#(mA)(fU)(mU)(fC)(mA)(fA)(mC)(fC)(mA)(mC)(mC)(fA)#(mA)#(mA)-TegChol | 303 |
| (mA)#(mU)#(mG)(fU)(mU)(fG)(mU)(fA)(mU)(fG)(mA)(mU)(mU)(fU)#(mC)#(mA)-TegChol | 304 |
| (mG)#(mU)#(mA)(fU)(mG)(fA)(mU)(fU)(mU)(fC)(mC)(mA)(mG)(fA)#(mG)#(mA)-TegChol | 305 |
| (mA)#(mG)#(mA)(fU)(mC)(fA)(mA)(fA)(mU)(fU)(mA)(mC)(mA)(fU)#(mU)#(mA)-TegChol | 306 |
| (mC)#(mA)#(mA)(fA)(mU)(fU)(mA)(fC)(mA)(fU)(mU)(mU)(mA)(fU)#(mG)#(mA)-TegChol | 307 |
| (mU)#(mU)#(mA)(fU)(mU)(fU)(mC)(fC)(mU)(fA)(mA)(mC)(mA)(fG)#(mU)#(mA)-TegChol | 308 |
| (mA)#(mU)#(mU)(fU)(mC)(fC)(mU)(fA)(mA)(fC)(mA)(mG)(mU)(fU)#(mU)#(mA)-TegChol | 309 |
| (mU)#(mU)#(mU)(fC)(mC)(fU)(mA)(fA)(mC)(fA)(mG)(mU)(mU)(fU)#(mC)#(mA)-TegChol | 310 |
| (mG)#(mA)#(mA)(fG)(mA)(fA)(mU)(fC)(mU)(fA)(mU)(mA)(mU)(fG)#(mU)#(mA)-TegChol | 311 |
| (mA)#(mA)#(mG)(fA)(mA)(fU)(mC)(fU)(mA)(fU)(mA)(mU)(mG)(fU)#(mA)#(mA)-TegChol | 312 |
| (mG)#(mA)#(mA)(fU)(mC)(fU)(mA)(fU)(mA)(fU)(mG)(mU)(mA)(fG)#(mC)#(mA)-TegChol | 313 |
| (mA)#(mA)#(mA)(fG)(mU)(fG)(mU)(fA)(mG)(fG)(mA)(mU)(mU)(fG)#(mU)#(mA)-TegChol | 314 |
| (mA)#(mA)#(mG)(fU)(mG)(fU)(mA)(fG)(mG)(fA)(mU)(mU)(mG)(fU)#(mU)#(mA)-TegChol | 315 |
| (mU)#(mA)#(mC)(fA)(mC)(fU)(mU)(fA)(mU)(fA)(mU)(mU)(mU)(fG)#(mU)#(mA)-TegChol | 316 |
| (mU)#(mU)#(mA)(fU)(mA)(fU)(mU)(fU)(mG)(fU)(mA)(mU)(mU)(fG)#(mU)#(mA)-TegChol | 317 |
| (mG)#(mU)#(mA)(fU)(mU)(fG)(mU)(fA)(mU)(fA)(mC)(mU)(mU)(fG)#(mG)#(mA)-TegChol | 318 |
| (mU)#(mA)#(mU)(fU)(mG)(fU)(mA)(fU)(mA)(fC)(mU)(mU)(mG)(fG)#(mU)#(mA)-TegChol | 319 |
| (mA)#(mC)#(mA)(fA)(mA)(fG)(mU)(fA)(mG)(fG)(mA)(mA)(mU)(fG)#(mG)#(mA)-TegChol | 320 |
| (mG)#(mG)#(mA)(fA)(mA)(fG)(mA)(fA)(mG)(fA)(mA)(mU)(mC)(fU)#(mU)#(mA)-TegChol | 321 |
| (mC)#(mA)#(mG)(fC)(mC)(fA)(mA)(fA)(mC)(fA)(mG)(mU)(mA)(fU)#(mU)#(mA)-TegChol | 322 |
| (mC)#(mC)#(mU)(fU)(mU)(fA)(mU)(fC)(mA)(fC)(mA)(mU)(mG)(fG)#(mC)#(mA)-TegChol | 323 |
| (mA)#(mA)#(mA)(fU)(mG)(fA)(mC)(fU)(mG)(fG)(mU)(mU)(mC)(fU)#(mA)#(mA)-TegChol | 324 |
| (mC)#(mU)#(mC)(fU)(mG)(fA)(mA)(fA)(mC)(fA)(mA)(mU)(mU)(fA)#(mC)#(mA)-TegChol | 325 |
| (mA)#(mA)#(mA)(fC)(mA)(fA)(mU)(fU)(mA)(fC)(mA)(mU)(mU)(fU)#(mA)#(mA)-TegChol | 326 |
| (mA)#(mA)#(mC)(fA)(mA)(fU)(mU)(fA)(mC)(fA)(mU)(mU)(mU)(fA)#(mU)#(mA)-TegChol | 327 |
| (mA)#(mC)#(mA)(fA)(mU)(fU)(mA)(fC)(mA)(fU)(mU)(mU)(mA)(fU)#(mA)#(mA)-TegChol | 328 |
| (mU)#(mU)#(mA)(fU)(mA)(fU)(mA)(fA)(mU)(fA)(mU)(mG)(mU)(fA)#(mU)#(mA)-TegChol | 329 |
| (mU)#(mA)#(mU)(fG)(mU)(fA)(mU)(fA)(mC)(fA)(mA)(mU)(mA)(fU)#(mU)#(mA)-TegChol | 330 |
| (mA)#(mU)#(mG)(fU)(mA)(fU)(mA)(fC)(mA)(fA)(mU)(mA)(mU)(fU)#(mG)#(mA)-TegChol | 331 |
| (mU)#(mA)#(mU)(fA)(mC)(fA)(mA)(fU)(mA)(fU)(mU)(mG)(mU)(fU)#(mU)#(mA)-TegChol | 332 |
| (mU)#(mU)#(mG)(fU)(mA)(fA)(mA)(fU)(mA)(fA)(mG)(mU)(mG)(fU)#(mC)#(mA)-TegChol | 333 |
| (mG)#(mU)#(mA)(fA)(mA)(fU)(mA)(fA)(mG)(fU)(mG)(mU)(mC)(fU)#(mC)#(mA)-TegChol | 334 |
| (mU)#(mA)#(mA)(fA)(mU)(fA)(mA)(fG)(mU)(fG)(mU)(mC)(mU)(fC)#(mC)#(mA)-TegChol | 335 |
| (mA)#(mA)#(mA)(fU)(mA)(fA)(mG)(fU)(mG)(fU)(mC)(mU)(mC)(fC)#(mU)#(mA)-TegChol | 336 |
| (mA)#(mU)#(mA)(fA)(mG)(fU)(mG)(fU)(mC)(fU)(mC)(mC)(mU)(fU)#(mU)#(mA)-TegChol | 337 |
| (mA)#(mC)#(mA)(fC)(mU)(fA)(mA)(fU)(mG)(fA)(mA)(mA)(mU)(fU)#(mU)#(mA)-TegChol | 338 |
| (mC)#(mA)#(mC)(fU)(mA)(fA)(mU)(fG)(mA)(fA)(mA)(mU)(mU)(fU)#(mC)#(mA)-TegChol | 339 |
| (mA)#(mC)#(mU)(fA)(mA)(fU)(mG)(fA)(mA)(fA)(mU)(mU)(mU)(fC)#(mA)#(mA)-TegChol | 340 |
| (mA)#(mA)#(mA)(fU)(mU)(fU)(mC)(fA)(mA)(fA)(mU)(mC)(mA)(fU)#(mU)#(mA)-TegChol | 341 |
| (mU)#(mC)#(mA)(fU)(mU)(fA)(mA)(fA)(mG)(fU)(mA)(mC)(mA)(fA)#(mA)#(mA)-TegChol | 342 |
| (mG)#(mC)#(mA)(fG)(mA)(fU)(mU)(fC)(mA)(fA)(mU)(mA)(mG)(fU)#(mG)#(mA)-TegChol | 343 |
| (mA)#(mG)#(mA)(fU)(mU)(fC)(mA)(fA)(mU)(fA)(mG)(mU)(mG)(fG)#(mU)#(mA)-TegChol | 344 |
| (mU)#(mU)#(mA)(fA)(mG)(fA)(mU)(fU)(mA)(fG)(mA)(mA)(mG)(fG)#(mU)#(mA)-TegChol | 345 |
| (mA)#(mG)#(mA)(fU)(mU)(fA)(mG)(fA)(mA)(fG)(mG)(mU)(mU)(fA)#(mU)#(mA)-TegChol | 346 |
| (mA)#(mU)#(mU)(fA)(mG)(fA)(mA)(fG)(mG)(fU)(mU)(mA)(mU)(fA)#(mU)#(mA)-TegChol | 347 |
| (mU)#(mU)#(mA)(fU)(mA)(fU)(mU)(fA)(mC)(fA)(mA)(mU)(mC)(fA)#(mA)#(mA)-TegChol | 348 |
| (mA)#(mU)#(mA)(fU)(mU)(fA)(mC)(fA)(mA)(fU)(mC)(mA)(mA)(fU)#(mU)#(mA)-TegChol | 349 |
| (mA)#(mU)#(mU)(fA)(mC)(fA)(mA)(fU)(mC)(fA)(mA)(mU)(mU)(fU)#(mA)#(mA)-TegChol | 350 |
| (mA)#(mC)#(mA)(fA)(mU)(fC)(mA)(fA)(mU)(fU)(mU)(mA)(mU)(fG)#(mU)#(mA)-TegChol | 351 |
| (mC)#(mA)#(mA)(fU)(mC)(fA)(mA)(fU)(mU)(fU)(mA)(mU)(mG)(fU)#(mA)#(mA)-TegChol | 352 |
| (mC)#(mA)#(mU)(fU)(mA)(fU)(mC)(fA)(mA)(fC)(mA)(mU)(mU)(fC)#(mA)#(mA)-TegChol | 353 |
| (mA)#(mA)#(mA)(fC)(mA)(fU)(mA)(fC)(mC)(fA)(mA)(mC)(mA)(fU)#(mG)#(mA)-TegChol | 354 |
| (mA)#(mC)#(mA)(fU)(mA)(fC)(mC)(fA)(mA)(fC)(mA)(mU)(mG)(fU)#(mA)#(mA)-TegChol | 355 |
| (mA)#(mC)#(mA)(fU)(mG)(fU)(mA)(fU)(mC)(fU)(mA)(mA)(mA)(fG)#(mA)#(mA)-TegChol | 356 |
| (mC)#(mA)#(mA)(fA)(mU)(fA)(mU)(fG)(mG)(fU)(mA)(mU)(mC)(fU)#(mC)#(mA)-TegChol | 357 |
| (mG)#(mU)#(mA)(fU)(mC)(fU)(mC)(fA)(mA)(fU)(mA)(mA)(mC)(fA)#(mG)#(mA)-TegChol | 358 |
| (mU)#(mC)#(mA)(fA)(mU)(fA)(mA)(fC)(mA)(fG)(mC)(mU)(mA)(fC)#(mU)#(mA)-TegChol | 359 |
| (mC)#(mA)#(mA)(fU)(mA)(fA)(mC)(fA)(mG)(fC)(mU)(mA)(mC)(fU)#(mU)#(mA)-TegChol | 360 |
| (mA)#(mA)#(mU)(fA)(mA)(fC)(mA)(fG)(mC)(fU)(mA)(mC)(mU)(fU)#(mU)#(mA)-TegChol | 361 |
| (mU)#(mA)#(mA)(fU)(mU)(fU)(mG)(fA)(mC)(fA)(mA)(mU)(mG)(fA)#(mA)#(mA)-TegChol | 362 |
| (mA)#(mC)#(mA)(fA)(mU)(fG)(mA)(fA)(mU)(fA)(mC)(mA)(mU)(fU)#(mU)#(mA)-TegChol | 363 |
| (mC)#(mA)#(mA)(fU)(mG)(fA)(mA)(fU)(mA)(fC)(mA)(mU)(mU)(fU)#(mC)#(mA)-TegChol | 364 |
| (mA)#(mA)#(mU)(fG)(mA)(fA)(mU)(fA)(mC)(fA)(mU)(mU)(mU)(fC)#(mU)#(mA)-TegChol | 365 |
| (mA)#(mU)#(mA)(fA)(mA)(fU)(mU)(fG)(mG)(fA)(mA)(mC)(mU)(fU)#(mU)#(mA)-TegChol | 366 |
| (mU)#(mA)#(mA)(fA)(mU)(fU)(mG)(fG)(mA)(fA)(mC)(mU)(mU)(fU)#(mG)#(mA)-TegChol | 367 |
| (mA)#(mA)#(mA)(fU)(mU)(fG)(mG)(fA)(mA)(fC)(mU)(mU)(mU)(fG)#(mU)#(mA)-TegChol | 368 |
| (mA)#(mC)#(mU)(fU)(mU)(fG)(mU)(fU)(mU)(fA)(mU)(mC)(mA)(fA)#(mA)#(mA)-TegChol | 369 |
| (mU)#(mC)#(mA)(fU)(mA)(fG)(mC)(fU)(mA)(fA)(mA)(mU)(mG)(fA)#(mA)#(mA)-TegChol | 370 |
| (mC)#(mU)#(mA)(fA)(mA)(fU)(mG)(fA)(mA)(fA)(mU)(mU)(mA)(fU)#(mU)#(mA)-TegChol | 371 |
| (mA)#(mA)#(mA)(fU)(mG)(fA)(mA)(fA)(mU)(fU)(mA)(mU)(mU)(fU)#(mC)#(mA)-TegChol | 372 |
| Antisense Strand | |
| P(mU)#(fC)#(mU)(fU)(fG)(fU)(mU)(fC)(mU)(fU)(mA)(fU)(mU)(fU)#(mC)#(fU)#(mU)#(mC)#(mU)#(mU)#(fU) | 373 |
| P(mU)#(fC)#(mA)(fC)(fG)(fC)(mA)(fC)(mA)(fU)(mG)(fC)(mA)(fU)#(mU)#(fA)#(mC)#(mA)#(mC)#(mU)#(fU) | 374 |
| P(mU)#(fU)#(mG)(fG)(fC)(fU)(mU)(fC)(mU)(fA)(mU)(fU)(mC)(fU)#(mG)#(fG)#(mA)#(mG)#(mU)#(mU)#(fU) | 375 |
| P(mU)#(fA)#(mA)(fC)(fA)(fU)(mU)(fU)(mG)(fG)(mG)(fC)(mU)(fU)#(mG)#(fC)#(mC)#(mA)#(mU)#(mU)#(fU) | 376 |
| P(mU)#(fC)#(mA)(fA)(fC)(fA)(mU)(fU)(mU)(fG)(mG)(fG)(mC)(fU)#(mU)#(fG)#(mC)#(mC)#(mA)#(mU)#(fU) | 377 |
| P(mU)#(fC)#(mA)(fC)(fU)(fG)(mU)(fU)(mG)(fU)(mA)(fG)(mG)(fA)#(mG)#(fU)#(mC)#(mU)#(mU)#(mU)#(fU) | 378 |
| P(mU)#(fU)#(mA)(fA)(fG)(fU)(mU)(fG)(mG)(fA)(mU)(fU)(mC)(fA)#(mG)#(fG)#(mC)#(mU)#(mG)#(mU)#(fU) | 379 |
| P(mU)#(fA)#(mU)(fA)(fA)(fU)(mC)(fC)(mA)(fG)(mU)(fC)(mC)(fC)#(mA)#(fU)#(mC)#(mC)#(mA)#(mU)#(fU) | 400 |
| P(mU)#(fC)#(mA)(fC)(fA)(fC)(mU)(fC)(mU)(fC)(mC)(fU)(mG)(fA)#(mG)#(fC)#(mA)#(mG)#(mU)#(mU)#(fU) | 401 |
| P(mU)#(fC)#(mA)(fA)(fA)(fU)(mU)(fC)(mA)(fC)(mA)(fC)(mU)(fC)#(mU)#(fC)#(mC)#(mU)#(mG)#(mU)#(fU) | 402 |
| P(mU)#(fA)#(mC)(fA)(fA)(fA)(mU)(fU)(mC)(fA)(mC)(fA)(mC)(fU)#(mC)#(fU)#(mC)#(mC)#(mU)#(mU)#(fU) | 403 |
| P(mU)#(fA)#(mA)(fU)(fA)(fU)(mA)(fG)(mC)(fA)(mU)(fA)(mU)(fU)#(mA)#(fA)#(mU)#(mG)#(mG)#(mU)#(fU) | 404 |
| P(mU)#(fU)#(mU)(fA)(fU)(fU)(mU)(fG)(mU)(fU)(mC)(fU)(mU)(fU)#(mG)#(fC)#(mC)#(mA)#(mU)#(mU)#(fU) | 405 |
| P(mU)#(fA)#(mU)(fU)(fA)(fU)(mU)(fU)(mG)(fU)(mU)(fC)(mU)(fU)#(mU)#(fG)#(mC)#(mC)#(mA)#(mU)#(fU) | 406 |
| P(mU)#(fU)#(mA)(fU)(mU)(fA)(mU)(fU)(mU)(fG)(mU)(fU)(mC)#(fU)#(mU)#(fU)#(mG)#(fC)#(mC)#(fU) | 407 |
| P(mU)#(fA)#(mA)(fA)(fU)(fU)(mU)(fC)(mU)(fA)(mA)(fC)(mC)(fU)#(mA)#(fA)#(mU)#(mG)#(mC)#(mU)#(fU) | 408 |
| P(mU)#(fU)#(mA)(fC)(fA)(fG)(mC)(fC)(mU)(fG)(mU)(fG)(mG)(fU)#(mG)#(fC)#(mU)#(mU)#(mG)#(mU)#(fU) | 409 |
| P(mU)#(fA)#(mU)(fA)(fC)(fA)(mC)(fU)(mG)(fU)(mA)(fG)(mC)(fU)#(mU)#(fG)#(mU)#(mG)#(mC)#(mU)#(fU) | 410 |
| P(mU)#(fU)#(mU)(fG)(fG)(fU)(mG)(fG)(mU)(fU)(mG)(fA)(mA)(fU)#(mG)#(fC)#(mC)#(mA)#(mA)#(mU)#(fU) | 411 |
| P(mU)#(fG)#(mA)(fA)(fA)(fU)(mC)(fA)(mU)(fA)(mC)(fA)(mA)(fC)#(mA)#(fU)#(mC)#(mC)#(mU)#(mU)#(fU) | 412 |
| P(mU)#(fC)#(mU)(fC)(fU)(fG)(mG)(fA)(mA)(fA)(mU)(fC)(mA)(fU)#(mA)#(fC)#(mA)#(mA)#(mC)#(mU)#(fU) | 413 |
| P(mU)#(fA)#(mA)(fU)(fG)(fU)(mA)(fA)(mU)(fU)(mU)(fG)(mA)(fU)#(mC)#(fU)#(mC)#(mC)#(mA)#(mU)#(fU) | 414 |
| P(mU)#(fC)#(mA)(fU)(fA)(fA)(mA)(fU)(mG)(fU)(mA)(fA)(mU)(fU)#(mU)#(fG)#(mA)#(mU)#(mC)#(mU)#(fU) | 415 |
| P(mU)#(fA)#(mC)(fU)(fG)(fU)(mU)(fA)(mG)(fG)(mA)(fA)(mA)(fU)#(mA)#(fA)#(mG)#(mA)#(mC)#(mU)#(fU) | 416 |
| P(mU)#(fA)#(mA)(fA)(fC)(fU)(mG)(fU)(mU)(fA)(mG)(fG)(mA)(fA)#(mA)#(fU)#(mA)#(mA)#(mG)#(mU)#(fU) | 417 |
| P(mU)#(fG)#(mA)(fA)(fA)(fC)(mU)(fG)(mU)(fU)(mA)(fG)(mG)(fA)#(mA)#(fA)#(mU)#(mA)#(mA)#(mU)#(fU) | 418 |
| P(mU)#(fA)#(mC)(fA)(fU)(fA)(mU)(fA)(mG)(fA)(mU)(fU)(mC)(fU)#(mU)#(fC)#(mC)#(mG)#(mU)#(mU)#(fU) | 419 |
| P(mU)#(fU)#(mA)(fC)(fA)(fU)(mA)(fU)(mA)(fG)(mA)(fU)(mU)(fC)#(mU)#(fU)#(mC)#(mC)#(mG)#(mU)#(fU) | 420 |
| P(mU)#(fG)#(mC)(fU)(fA)(fC)(mA)(fU)(mA)(fU)(mA)(fG)(mA)(fU)#(mU)#(fC)#(mU)#(mU)#(mC)#(mU)#(fU) | 421 |
| P(mU)#(fA)#(mC)(fA)(fA)(fU)(mC)(fC)(mU)(fA)(mC)(fA)(mC)(fU)#(mU)#(fU)#(mA)#(mC)#(mA)#(mU)#(fU) | 422 |
| P(mU)#(fA)#(mA)(fC)(fA)(fA)(mU)(fC)(mC)(fU)(mA)(fC)(mA)(fC)#(mU)#(fU)#(mU)#(mA)#(mC)#(mU)#(fU) | 423 |
| P(mU)#(fA)#(mC)(fA)(fA)(fA)(mU)(fA)(mU)(fA)(mA)(fG)(mU)(fG)#(mU)#(fA)#(mC)#(mA)#(mU)#(mU)#(fU) | 424 |
| P(mU)#(fA)#(mC)(fA)(fA)(fU)(mA)(fC)(mA)(fA)(mA)(fU)(mA)(fU)#(mA)#(fA)#(mG)#(mU)#(mG)#(mU)#(fU) | 425 |
| P(mU)#(fC)#(mC)(fA)(fA)(fG)(mU)(fA)(mU)(fA)(mC)(fA)(mA)(fU)#(mA)#(fC)#(mA)#(mA)#(mA)#(mU)#(fU) | 426 |
| P(mU)#(fA)#(mC)(fC)(fA)(fA)(mG)(fU)(mA)(fU)(mA)(fC)(mA)(fA)#(mU)#(fA)#(mC)#(mA)#(mA)#(mU)#(fU) | 427 |
| P(mU)#(fC)#(mC)(fA)(fU)(fU)(mC)(fC)(mU)(fA)(mC)(fU)(mU)(fU)#(mG)#(fU)#(mG)#(mG)#(mA)#(mU)#(fU) | 428 |
| P(mU)#(fA)#(mA)(fG)(fA)(fU)(mU)(fC)(mU)(fU)(mC)(fU)(mU)(fU)#(mC)#(fC)#(mU)#(mU)#(mA)#(mU)#(fU) | 429 |
| P(mU)#(fA)#(mA)(fU)(fA)(fC)(mU)(fG)(mU)(fU)(mU)(fG)(mG)(fC)#(mU)#(fG)#(mC)#(mC)#(mU)#(mU)#(fU) | 430 |
| P(mU)#(fG)#(mC)(fC)(fA)(fU)(mG)(fU)(mG)(fA)(mU)(fA)(mA)(fA)#(mG)#(fG)#(mC)#(mA)#(mG)#(mU)#(fU) | 431 |
| P(mU)#(fU)#(mA)(fG)(fA)(fA)(mC)(fC)(mA)(fG)(mU)(fC)(mA)(fU)#(mU)#(fU)#(mC)#(mC)#(mA)#(mU)#(fU) | 432 |
| P(mU)#(fG)#(mU)(fA)(fA)(fU)(mU)(fG)(mU)(fU)(mU)(fC)(mA)(fG)#(mA)#(fG)#(mU)#(mC)#(mU)#(mU)#(fU) | 433 |
| P(mU)#(fU)#(mA)(fA)(fA)(fU)(mG)(fU)(mA)(fA)(mU)(fU)(mG)(fU)#(mU)#(fU)#(mC)#(mA)#(mG)#(mU)#(fU) | 434 |
| P(mU)#(fA)#(mU)(fA)(fA)(fA)(mU)(fG)(mU)(fA)(mA)(fU)(mU)(fG)#(mU)#(fU)#(mU)#(mC)#(mA)#(mU)#(fU) | 435 |
| P(mU)#(fU)#(mA)(fU)(fA)(fA)(mA)(fU)(mG)(fU)(mA)(fA)(mU)(fU)#(mG)#(fU)#(mU)#(mU)#(mC)#(mU)#(fU) | 436 |
| P(mU)#(fA)#(mU)(fA)(fC)(fA)(mU)(fA)(mU)(fU)(mA)(fU)(mA)(fU)#(mA)#(fA)#(mA)#(mU)#(mG)#(mU)#(fU) | 437 |
| P(mU)#(fA)#(mA)(fU)(fA)(fU)(mU)(fG)(mU)(fA)(mU)(fA)(mC)(fA)#(mU)#(fA)#(mU)#(mU)#(mA)#(mU)#(fU) | 438 |
| P(mU)#(fC)#(mA)(fA)(fU)(fA)(mU)(fU)(mG)(fU)(mA)(fU)(mA)(fC)#(mA)#(fU)#(mA)#(mU)#(mU)#(mU)#(fU) | 439 |
| P(mU)#(fA)#(mA)(fA)(fC)(fA)(mA)(fU)(mA)(fU)(mU)(fG)(mU)(fA)#(mU)#(fA)#(mC)#(mA)#(mU)#(mU)#(fU) | 440 |
| P(mU)#(fG)#(mA)(fC)(fA)(fC)(mU)(fU)(mA)(fU)(mU)(fU)(mA)(fC)#(mA)#(fA)#(mA)#(mA)#(mC)#(mU)#(fU) | 441 |
| P(mU)#(fG)#(mA)(fG)(fA)(fC)(mA)(fC)(mU)(fU)(mA)(fU)(mU)(fU)#(mA)#(fC)#(mA)#(mA)#(mA)#(mU)#(fU) | 442 |
| P(mU)#(fG)#(mG)(fA)(fG)(fA)(mC)(fA)(mC)(fU)(mU)(fA)(mU)(fU)#(mU)#(fA)#(mC)#(mA)#(mA)#(mU)#(fU) | 443 |
| P(mU)#(fA)#(mG)(fG)(fA)(fG)(mA)(fC)(mA)(fC)(mU)(fU)(mA)(fU)#(mU)#(fU)#(mA)#(mC)#(mA)#(mU)#(fU) | 444 |
| P(mU)#(fA)#(mA)(fA)(fG)(fG)(mA)(fG)(mA)(fC)(mA)(fC)(mU)(fU)#(mA)#(fU)#(mU)#(mU)#(mA)#(mU)#(fU) | 445 |
| P(mU)#(fA)#(mA)(fA)(fU)(fU)(mU)(fC)(mA)(fU)(mU)(fA)(mG)(fU)#(mG)#(fU)#(mA)#(mA)#(mA)#(mU)#(fU) | 446 |
| P(mU)#(fG)#(mA)(fA)(fA)(fU)(mU)(fU)(mC)(fA)(mU)(fU)(mA)(fG)#(mU)#(fG)#(mU)#(mA)#(mA)#(mU)#(fU) | 447 |
| P(mU)#(fU)#(mG)(fA)(fA)(fA)(mU)(fU)(mU)(fC)(mA)(fU)(mU)(fA)#(mG)#(fU)#(mG)#(mU)#(mA)#(mU)#(fU) | 448 |
| P(mU)#(fA)#(mA)(fU)(fG)(fA)(mU)(fU)(mU)(fG)(mA)(fA)(mA)(fU)#(mU)#(fU)#(mC)#(mA)#(mU)#(mU)#(fU) | 449 |
| P(mU)#(fU)#(mU)(fU)(fG)(fU)(mA)(fC)(mU)(fU)(mU)(fA)(mA)(fU)#(mG)#(fA)#(mU)#(mU)#(mU)#(mU)#(fU) | 450 |
| P(mU)#(fC)#(mA)(fC)(fU)(fA)(mU)(fU)(mG)(fA)(mA)(fU)(mC)(fU)#(mG)#(fC)#(mU)#(mA)#(mA)#(mU)#(fU) | 451 |
| P(mU)#(fA)#(mC)(fC)(fA)(fC)(mU)(fA)(mU)(fU)(mG)(fA)(mA)(fU)#(mC)#(fU)#(mG)#(mC)#(mU)#(mU)#(fU) | 452 |
| P(mU)#(fA)#(mC)(fC)(fU)(fU)(mC)(fU)(mA)(fA)(mU)(fC)(mU)(fU)#(mA)#(fA)#(mC)#(mA)#(mU)#(mU)#(fU) | 453 |
| P(mU)#(fA)#(mU)(fA)(fA)(fC)(mC)(fU)(mU)(fC)(mU)(fA)(mA)(fU)#(mC)#(fU)#(mU)#(mA)#(mA)#(mU)#(fU) | 454 |
| P(mU)#(fA)#(mU)(fA)(fU)(fA)(mA)(fC)(mC)(fU)(mU)(fC)(mU)(fA)#(mA)#(fU)#(mC)#(mU)#(mU)#(mU)#(fU) | 455 |
| P(mU)#(fU)#(mU)(fG)(fA)(fU)(mU)(fG)(mU)(fA)(mA)(fU)(mA)(fU)#(mA)#(fA)#(mC)#(mC)#(mU)#(mU)#(fU) | 456 |
| P(mU)#(fA)#(mA)(fU)(fU)(fG)(mA)(fU)(mU)(fG)(mU)(fA)(mA)(fU)#(mA)#(fU)#(mA)#(mA)#(mC)#(mU)#(fU) | 457 |
| P(mU)#(fU)#(mA)(fA)(fA)(fU)(mU)(fG)(mA)(fU)(mU)(fG)(mU)(fA)#(mA)#(fU)#(mA)#(mU)#(mA)#(mU)#(fU) | 458 |
| P(mU)#(fA)#(mC)(fA)(fU)(fA)(mA)(fA)(mU)(fU)(mG)(fA)(mU)(fU)#(mG)#(fU)#(mA)#(mA)#(mU)#(mU)#(fU) | 459 |
| P(mU)#(fU)#(mA)(fC)(fA)(fU)(mA)(fA)(mA)(fU)(mU)(fG)(mA)(fU)#(mU)#(fG)#(mU)#(mA)#(mA)#(mU)#(fU) | 460 |
| P(mU)#(fU)#(mG)(fA)(fA)(fU)(mG)(fU)(mU)(fG)(mA)(fU)(mA)(fA)#(mU)#(fG)#(mU)#(mA)#(mA)#(mU)#(fU) | 461 |
| P(mU)#(fC)#(mA)(fU)(fG)(fU)(mU)(fG)(mG)(fU)(mA)(fU)(mG)(fU)#(mU)#(fU)#(mA)#(mG)#(mU)#(mU)#(fU) | 462 |
| P(mU)#(fU)#(mA)(fC)(fA)(fU)(mG)(fU)(mU)(fG)(mG)(fU)(mA)(fU)#(mG)#(fU)#(mU)#(mU)#(mA)#(mU)#(fU) | 463 |
| P(mU)#(fU)#(mC)(fU)(fU)(fU)(mA)(fG)(mA)(fU)(mA)(fC)(mA)(fU)#(mG)#(fU)#(mU)#(mG)#(mG)#(mU)#(fU) | 464 |
| P(mU)#(fG)#(mA)(fG)(fA)(fU)(mA)(fC)(mC)(fA)(mU)(fA)(mU)(fU)#(mU)#(fG)#(mU)#(mA)#(mU)#(mU)#(fU) | 465 |
| P(mU)#(fC)#(mU)(fG)(fU)(fU)(mA)(fU)(mU)(fG)(mA)(fG)(mA)(fU)#(mA)#(fC)#(mC)#(mA)#(mU)#(mU)#(fU) | 466 |
| P(mU)#(fA)#(mG)(fU)(fA)(fG)(mC)(fU)(mG)(fU)(mU)(fA)(mU)(fU)#(mG)#(fA)#(mG)#(mA)#(mU)#(mU)#(fU) | 467 |
| P(mU)#(fA)#(mA)(fG)(fU)(fA)(mG)(fC)(mU)(fG)(mU)(fU)(mA)(fU)#(mU)#(fG)#(mA)#(mG)#(mA)#(mU)#(fU) | 468 |
| P(mU)#(fA)#(mA)(fA)(fG)(fU)(mA)(fG)(mC)(fU)(mG)(fU)(mU)(fA)#(mU)#(fU)#(mG)#(mA)#(mG)#(mU)#(fU) | 469 |
| P(mU)#(fU)#(mU)(fC)(fA)(fU)(mU)(fG)(mU)(fC)(mA)(fA)(mA)(fU)#(mU)#(fA)#(mU)#(mA)#(mA)#(mU)#(fU) | 470 |
| P(mU)#(fA)#(mA)(fA)(fU)(fG)(mU)(fA)(mU)(fU)(mC)(fA)(mU)(fU)#(mG)#(fU)#(mC)#(mA)#(mA)#(mU)#(fU) | 471 |
| P(mU)#(fG)#(mA)(fA)(fA)(fU)(mG)(fU)(mA)(fU)(mU)(fC)(mA)(fU)#(mU)#(fG)#(mU)#(mC)#(mA)#(mU)#(fU) | 472 |
| P(mU)#(fA)#(mG)(fA)(fA)(fA)(mU)(fG)(mU)(fA)(mU)(fU)(mC)(fA)#(mU)#(fU)#(mG)#(mU)#(mC)#(mU)#(fU) | 473 |
| P(mU)#(fA)#(mA)(fA)(fG)(fU)(mU)(fC)(mC)(fA)(mA)(fU)(mU)(fU)#(mA)#(fU)#(mA)#(mA)#(mA)#(mU)#(fU) | 474 |
| P(mU)#(fC)#(mA)(fA)(fA)(fG)(mU)(fU)(mC)(fC)(mA)(fA)(mU)(fU)#(mU)#(fA)#(mU)#(mA)#(mA)#(mU)#(fU) | 475 |
| P(mU)#(fA)#(mC)(fA)(fA)(fA)(mG)(fU)(mU)(fC)(mC)(fA)(mA)(fU)#(mU)#(fU)#(mA)#(mU)#(mA)#(mU)#(fU) | 476 |
| P(mU)#(fU)#(mU)(fU)(fG)(fA)(mU)(fA)(mA)(fA)(mC)(fA)(mA)(fA)#(mG)#(fU)#(mU)#(mC)#(mC)#(mU)#(fU) | 477 |
| P(mU)#(fU)#(mU)(fC)(fA)(fU)(mU)(fU)(mA)(fG)(mC)(fU)(mA)(fU)#(mG)#(fA)#(mG)#(mU)#(mA)#(mU)#(fU) | 478 |
| P(mU)#(fA)#(mA)(fU)(fA)(fA)(mU)(fU)(mU)(fC)(mA)(fU)(mU)(fU)#(mA)#(fG)#(mC)#(mU)#(mA)#(mU)#(fU) | 479 |
| P(mU)#(fG)#(mA)(fA)(fA)(fU)(mA)(fA)(mU)(fU)(mU)(fC)(mA)(fU)#(mU)#(fU)#(mA)#(mG)#(mC)#(mU)#(fU) | 480 |

m is2′-O-methyl nucleosides;
f is 2′-Fluoro nucleosides;
P is 5′-(E)-Vinylphosphonate;
# is phosphorothioate linkage;
TegChol is TEG linker + cholesterol

TABLE 5
Modified human MSTN specific siRNA

| | SEQ |
|---|---|
| | ID |
| | NO |
| Sense Strand | |
| (mU)#(mA)#(mA)(fU)(mG)(fC)(mA)(fU)(mG)(fU)(mA)(mC)(mU)(fU)#(mG)#(mA)-TegChol | 481 |
| (mG)#(mA)#(mA)(fU)(mA)(fG)(mA)(fA)(mG)(fC)(mC)(mA)(mU)(fU)#(mA)#(mA)-TegChol | 482 |
| (mU)#(mU)#(mA)(fA)(mG)(fA)(mU)(fA)(mC)(fA)(mA)(mA)(mU)(fC)#(mC)#(mA)-TegChol | 483 |
| (mU)#(mC)#(mA)(fG)(mC)(fA)(mA)(fA)(mG)(fA)(mU)(mG)(mU)(fU)#(mA)#(mA)-TegChol | 484 |
| (mG)#(mC)#(mU)(fU)(mC)(fU)(mU)(fU)(mA)(fA)(mA)(mU)(mU)(fU)#(mA)#(mA)-TegChol | 485 |
| (mA)#(mA)#(mA)(fG)(mG)(fC)(mC)(fC)(mA)(fA)(mC)(mU)(mA)(fU)#(mG)#(mA)-TegChol | 486 |
| (mA)#(mC)#(mU)(fC)(mC)(fU)(mA)(fC)(mA)(fA)(mC)(mA)(mG)(fU)#(mG)#(mA)-TegChol | 487 |
| (mC)#(mU)#(mA)(fC)(mA)(fA)(mC)(fA)(mG)(fU)(mG)(mU)(mU)(fU)#(mG)#(mA)-TegChol | 488 |
| (mU)#(mG)#(mA)(fA)(mG)(fA)(mC)(fA)(mG)(fU)(mG)(mU)(mU)(fG)#(mC)#(mA)-TegChol | 489 |
| (mC)#(mA)#(mG)(fA)(mA)(fU)(mC)(fA)(mC)(fG)(mA)(mU)(mG)(fC)#(mU)#(mA)-TegChol | 490 |
| (mA)#(mU)#(mG)(fG)(mG)(fA)(mU)(fU)(mG)(fG)(mA)(mU)(mU)(fA)#(mU)#(mA)-TegChol | 491 |
| (mG)#(mA)#(mU)(fU)(mG)(fG)(mA)(fU)(mU)(fA)(mU)(mC)(mG)(fC)#(mU)#(mA)-TegChol | 492 |
| (mG)#(mC)#(mU)(fC)(mU)(fG)(mG)(fA)(mG)(fA)(mG)(mU)(mG)(fU)#(mG)#(mA)-TegChol | 493 |
| (mG)#(mA)#(mG)(fA)(mG)(fU)(mG)(fU)(mG)(fA)(mA)(mU)(mU)(fU)#(mG)#(mA)-TegChol | 494 |
| (mA)#(mG)#(mA)(fG)(mU)(fG)(mU)(fG)(mA)(fA)(mU)(mU)(mU)(fG)#(mU)#(mA)-TegChol | 495 |
| (mC)#(mC)#(mA)(fA)(mU)(fU)(mA)(fA)(mU)(fA)(mU)(mG)(mC)(fU)#(mA)#(mA)-TegChol | 496 |
| (mC)#(mA)#(mA)(fU)(mU)(fA)(mA)(fU)(mA)(fU)(mG)(mC)(mU)(fA)#(mU)#(mA)-TegChol | 497 |
| (mU)#(mU)#(mA)(fA)(mU)(fA)(mU)(fG)(mC)(fU)(mA)(mU)(mA)(fU)#(mU)#(mA)-TegChol | 498 |
| (mG)#(mC)#(mA)(fA)(mA)(fG)(mA)(fA)(mC)(fA)(mA)(mA)(mU)(fA)#(mA)#(mA)-TegChol | 499 |
| (mC)#(mA)#(mA)(fA)(mG)(fA)(mA)(fC)(mA)(fA)(mA)(mU)(mA)(fA)#(mU)#(mA)-TegChol | 500 |
| (fA)#(mA)#(fG)(mA)(fA)(mC)(fA)(mA)(fA)(mU)(fA)(mA)(fU)#(mA)#(fA)-TegChol | 501 |
| (mC)#(mA)#(mU)(fA)(mA)(fG)(mC)(fU)(mA)(fC)(mA)(mG)(mU)(fA)#(mU)#(mA)-TegChol | 502 |
| (mA)#(mU)#(mA)(fU)(mA)(fU)(mG)(fC)(mA)(fA)(mU)(mG)(mG)(fU)#(mU)#(mA)-TegChol | 503 |
| (mU)#(mG)#(mA)(fU)(mU)(fU)(mC)(fC)(mA)(fG)(mA)(mG)(mU)(fU)#(mU)#(mA)-TegChol | 504 |
| (mA)#(mG)#(mC)(fU)(mA)(fG)(mA)(fA)(mG)(fG)(mA)(mG)(mA)(fU)#(mC)#(mA)-TegChol | 505 |
| (mG)#(mC)#(mU)(fA)(mG)(fA)(mA)(fG)(mG)(fA)(mG)(mA)(mU)(fC)#(mA)#(mA)-TegChol | 506 |
| (mU)#(mC)#(mA)(fA)(mA)(fU)(mU)(fA)(mC)(fA)(mU)(mU)(mU)(fA)#(mU)#(mA)-TegChol | 507 |
| (mA)#(mA)#(mU)(fU)(mA)(fC)(mA)(fU)(mU)(fU)(mA)(mU)(mG)(fU)#(mU)#(mA)-TegChol | 508 |
| (mU)#(mU)#(mA)(fC)(mA)(fU)(mU)(fU)(mA)(fU)(mG)(mU)(mU)(fC)#(mC)#(mA)-TegChol | 509 |
| (mA)#(mC)#(mA)(fU)(mU)(fU)(mA)(fU)(mG)(fU)(mU)(mC)(mC)(fU)#(mA)#(mA)-TegChol | 510 |
| (mA)#(mU)#(mA)(fU)(mA)(fU)(mU)(fA)(mC)(fA)(mA)(mC)(mA)(fU)#(mC)#(mA)-TegChol | 511 |
| (mA)#(mA)#(mA)(fU)(mG)(fA)(mA)(fA)(mG)(fC)(mG)(mA)(mU)(fU)#(mC)#(mA)-TegChol | 512 |
| (mG)#(mA)#(mA)(fU)(mU)(fA)(mA)(fA)(mG)(fG)(mA)(mG)(mU)(fA)#(mU)#(mA)-TegChol | 513 |
| (mG)#(mC)#(mU)(fU)(mU)(fA)(mA)(fA)(mG)(fU)(mC)(mU)(mA)(fU)#(mU)#(mA)-TegChol | 514 |
| (mA)#(mA)#(mG)(fU)(mC)(fU)(mA)(fU)(mU)(fU)(mC)(mU)(mU)(fU)#(mA)#(mA)-TegChol | 515 |
| (mA)#(mU)#(mU)(fU)(mC)(fU)(mU)(fU)(mA)(fA)(mA)(mG)(mU)(fU)#(mU)#(mA)-TegChol | 516 |
| (mU)#(mU)#(mA)(fU)(mA)(fU)(mA)(fC)(mC)(fA)(mU)(mC)(mA)(fU)#(mU)#(mA)-TegChol | 517 |
| (mA)#(mU)#(mA)(fU)(mA)(fU)(mU)(fU)(mC)(fU)(mG)(mC)(mA)(fU)#(mU)#(mA)-TegChol | 518 |
| (mU)#(mC)#(mA)(fU)(mC)(fC)(mU)(fU)(mA)(fA)(mA)(mC)(mA)(fC)#(mU)#(mA)-TegChol | 519 |
| (mA)#(mA)#(mC)(fA)(mC)(fU)(mU)(fG)(mA)(fA)(mU)(mU)(mU)(fA)#(mU)#(mA)-TegChol | 520 |
| (mA)#(mC)#(mU)(fU)(mG)(fA)(mA)(fU)(mU)(fU)(mA)(mU)(mA)(fU)#(mU)#(mA)-TegChol | 521 |
| (mG)#(mA)#(mA)(fU)(mU)(fU)(mA)(fU)(mA)(fU)(mU)(mG)(mU)(fA)#(mU)#(mA)-TegChol | 522 |
| (mA)#(mU)#(mG)(fG)(mU)(fG)(mC)(fA)(mG)(fC)(mA)(mU)(mA)(fU)#(mG)#(mA)-TegChol | 523 |
| (mG)#(mC)#(mA)(fU)(mA)(fU)(mG)(fC)(mA)(fA)(mU)(mU)(mU)(fC)#(mC)#(mA)-TegChol | 524 |
| (mA)#(mA)#(mA)(fC)(mU)(fG)(mC)(fA)(mU)(fU)(mA)(mU)(mC)(fU)#(mU)#(mA)-TegChol | 525 |
| (mA)#(mG)#(mA)(fA)(mG)(fU)(mA)(fU)(mG)(fU)(mA)(mA)(mU)(fU)#(mU)#(mA)-TegChol | 526 |
| (mC)#(mC)#(mU)(fU)(mU)(fG)(mC)(fA)(mA)(fC)(mA)(mC)(mU)(fG)#(mC)#(mA)-TegChol | 527 |
| (mG)#(mC)#(mA)(fA)(mC)(fA)(mC)(fU)(mG)(fC)(mA)(mG)(mU)(fU)#(mU)#(mA)-TegChol | 528 |
| (mG)#(mA)#(mA)(fA)(mU)(fG)(mA)(fU)(mC)(fG)(mA)(mC)(mU)(fC)#(mU)#(mA)-TegChol | 529 |
| (mA)#(mA)#(mA)(fU)(mG)(fA)(mU)(fC)(mG)(fA)(mC)(mU)(mC)(fU)#(mA)#(mA)-TegChol | 530 |
| (mG)#(mA)#(mC)(fU)(mC)(fU)(mA)(fU)(mC)(fA)(mA)(mU)(mA)(fU)#(mU)#(mA)-TegChol | 531 |
| (mC)#(mU)#(mA)(fU)(mC)(fA)(mA)(fU)(mA)(fU)(mU)(mG)(mU)(fA)#(mU)#(mA)-TegChol | 532 |
| (mG)#(mA)#(mC)(fU)(mG)(fA)(mA)(fA)(mC)(fA)(mA)(mU)(mG)(fC)#(mA)#(mA)-TegChol | 533 |
| (mA)#(mA)#(mA)(fC)(mA)(fA)(mU)(fG)(mC)(fA)(mU)(mU)(mU)(fA)#(mU)#(mA)-TegChol | 534 |
| (mA)#(mC)#(mA)(fA)(mU)(fG)(mC)(fA)(mU)(fU)(mU)(mA)(mU)(fA)#(mU)#(mA)-TegChol | 535 |
| (mC)#(mA)#(mA)(fU)(mG)(fC)(mA)(fU)(mU)(fU)(mA)(mU)(mA)(fU)#(mA)#(mA)-TegChol | 536 |
| (mU)#(mA)#(mA)(fU)(mA)(fU)(mG)(fU)(mA)(fU)(mA)(mC)(mA)(fA)#(mU)#(mA)-TegChol | 537 |
| (mU)#(mA)#(mU)(fG)(mU)(fA)(mU)(fA)(mC)(fA)(mA)(mU)(mA)(fU)#(mU)#(mA)-TegChol | 538 |
| (mU)#(mA)#(mU)(fA)(mC)(fA)(mA)(fU)(mA)(fU)(mU)(mG)(mU)(fU)#(mU)#(mA)-TegChol | 539 |
| (mU)#(mU)#(mG)(fU)(mA)(fA)(mA)(fU)(mA)(fA)(mG)(mU)(mG)(fU)#(mC)#(mA)-TegChol | 540 |
| (mG)#(mU)#(mA)(fA)(mA)(fU)(mA)(fA)(mG)(fU)(mG)(mU)(mC)(fU)#(mC)#(mA)-TegChol | 541 |
| (mU)#(mA)#(mA)(fA)(mU)(fA)(mA)(fG)(mU)(fG)(mU)(mC)(mU)(fC)#(mC)#(mA)-TegChol | 542 |
| (mA)#(mA)#(mA)(fU)(mA)(fA)(mG)(fU)(mG)(fU)(mC)(mU)(mC)(fC)#(mU)#(mA)-TegChol | 543 |
| (mA)#(mC)#(mA)(fC)(mU)(fA)(mA)(fG)(mG)(fA)(mC)(mA)(mU)(fU)#(mU)#(mA)-TegChol | 544 |
| (mA)#(mC)#(mU)(fA)(mA)(fG)(mG)(fA)(mC)(fA)(mU)(mU)(mU)(fC)#(mA)#(mA)-TegChol | 545 |
| (mA)#(mC)#(mA)(fU)(mU)(fU)(mC)(fA)(mA)(fA)(mU)(mU)(mA)(fA)#(mG)#(mA)-TegChol | 546 |
| (mG)#(mC)#(mA)(fG)(mA)(fU)(mU)(fA)(mA)(fA)(mU)(mA)(mG)(fU)#(mG)#(mA)-TegChol | 547 |
| (mC)#(mA)#(mG)(fA)(mU)(fU)(mA)(fA)(mA)(fU)(mA)(mG)(mU)(fG)#(mG)#(mA)-TegChol | 548 |
| (mA)#(mG)#(mA)(fU)(mU)(fA)(mA)(fA)(mU)(fA)(mG)(mU)(mG)(fG)#(mU)#(mA)-TegChol | 549 |
| (mU)#(mA)#(mA)(fU)(mG)(fA)(mU)(fU)(mA)(fG)(mA)(mU)(mG)(fG)#(mU)#(mA)-TegChol | 550 |
| (mG)#(mA)#(mU)(fG)(mG)(fU)(mU)(fA)(mU)(fA)(mU)(mU)(mA)(fC)#(mA)#(mA)-TegChol | 551 |
| (mU)#(mU)#(mA)(fU)(mA)(fU)(mU)(fA)(mC)(fA)(mA)(mU)(mC)(fA)#(mU)#(mA)-TegChol | 552 |
| (mA)#(mC)#(mA)(fU)(mG)(fA)(mU)(fU)(mA)(fA)(mC)(mA)(mU)(fU)#(mC)#(mA)-TegChol | 553 |
| (mC)#(mA)#(mU)(fG)(mA)(fU)(mU)(fA)(mA)(fC)(mA)(mU)(mU)(fC)#(mA)#(mA)-TegChol | 554 |
| (mG)#(mU)#(mA)(fU)(mA)(fA)(mA)(fG)(mU)(fG)(mA)(mA)(mU)(fU)#(mU)#(mA)-TegChol | 555 |
| (mA)#(mA)#(mA)(fU)(mU)(fU)(mC)(fA)(mA)(fU)(mG)(mG)(mU)(fU)#(mU)#(mA)-TegChol | 556 |
| (mA)#(mU)#(mU)(fU)(mC)(fA)(mA)(fU)(mG)(fG)(mU)(mU)(mU)(fA)#(mC)#(mA)-TegChol | 557 |
| (mU)#(mU)#(mG)(fU)(mG)(fU)(mU)(fU)(mA)(fA)(mA)(mU)(mC)(fU)#(mC)#(mA)-TegChol | 558 |
| (mU)#(mU)#(mA)(fA)(mA)(fU)(mC)(fU)(mC)(fA)(mA)(mC)(mG)(fU)#(mU)#(mA)-TegChol | 559 |
| (mA)#(mA)#(mA)(fU)(mC)(fU)(mC)(fA)(mA)(fC)(mG)(mU)(mU)(fC)#(mC)#(mA)-TegChol | 560 |
| (mA)#(mA)#(mC)(fU)(mG)(fA)(mU)(fG)(mC)(fU)(mA)(mU)(mC)(fU)#(mC)#(mA)-TegChol | 561 |
| (mU)#(mC)#(mA)(fA)(mC)(fA)(mA)(fU)(mA)(fA)(mC)(mU)(mG)(fU)#(mU)#(mA)-TegChol | 562 |
| (mC)#(mA)#(mA)(fC)(mA)(fA)(mU)(fA)(mA)(fC)(mU)(mG)(mU)(fU)#(mA)#(mA)-TegChol | 563 |
| (mU)#(mA)#(mA)(fU)(mU)(fU)(mG)(fA)(mU)(fA)(mA)(mU)(mG)(fA)#(mA)#(mA)-TegChol | 564 |
| (mU)#(mA)#(mA)(fU)(mG)(fA)(mA)(fU)(mA)(fU)(mA)(mU)(mU)(fU)#(mC)#(mA)-TegChol | 565 |
| (mA)#(mA)#(mU)(fG)(mA)(fA)(mU)(fA)(mU)(fA)(mU)(mU)(mU)(fC)#(mU)#(mA)-TegChol | 566 |
| (mG)#(mA)#(mA)(fU)(mA)(fU)(mA)(fU)(mU)(fU)(mC)(mU)(mG)(fC)#(mA)#(mA)-TegChol | 567 |
| (mC)#(mU)#(mG)(fC)(mA)(fU)(mU)(fU)(mA)(fU)(mU)(mU)(mA)(fC)#(mU)#(mA)-TegChol | 568 |
| (mA)#(mU)#(mU)(fU)(mA)(fU)(mU)(fU)(mA)(fC)(mU)(mU)(mC)(fU)#(mG)#(mA)-TegChol | 569 |
| (mU)#(mA)#(mA)(fU)(mC)(fA)(mA)(fA)(mU)(fU)(mU)(mA)(mU)(fU)#(mG)#(mA)-TegChol | 570 |
| (mA)#(mC)#(mU)(fA)(mA)(fA)(mU)(fG)(mA)(fA)(mA)(mU)(mU)(fA)#(mU)#(mA)-TegChol | 571 |
| (mC)#(mU)#(mA)(fA)(mA)(fU)(mG)(fA)(mA)(fA)(mU)(mU)(mA)(fU)#(mU)#(mA)-TegChol | 572 |
| (mC)#(mU)#(mU)(fA)(mC)(fA)(mU)(fC)(mU)(fA)(mA)(mU)(mU)(fU)#(mG)#(mA)-TegChol | 573 |
| (mA)#(mC)#(mA)(fU)(mC)(fU)(mA)(fA)(mU)(fU)(mU)(mG)(mU)(fA)#(mG)#(mA)-TegChol | 574 |
| (mU)#(mA)#(mG)(fA)(mA)(fA)(mC)(fA)(mG)(fU)(mA)(mU)(mA)(fA)#(mG)#(mA)-TegChol | 575 |
| (mG)#(mA)#(mA)(fA)(mC)(fA)(mG)(fU)(mA)(fU)(mA)(mA)(mG)(fU)#(mU)#(mA)-TegChol | 576 |
| (mA)#(mC)#(mA)(fG)(mU)(fA)(mU)(fA)(mA)(fG)(mU)(mU)(mA)(fU)#(mA)#(mA)-TegChol | 577 |
| Antisense Strand | |
| P(mU)#(fC)#(mA)(fA)(fG)(fU)(mA)(fC)(mA)(fU)(mG)(fC)(mA)(fU)#(mU)#(fA)#(mC)#(mA)#(mC)#(mU)#(fU) | 578 |
| P(mU)#(fU)#(mA)(fA)(fU)(fG)(mG)(fC)(mU)(fU)(mC)(fU)(mA)(fU)#(mU)#(fC)#(mU)#(mU)#(mG)#(mU)#(fU) | 579 |
| P(mU)#(fG)#(mG)(fA)(fU)(fU)(mU)(fG)(mU)(fA)(mU)(fC)(mU)(fU)#(mA)#(fA)#(mU)#(mG)#(mG)#(mU)#(fU) | 580 |
| P(mU)#(fU)#(mA)(fA)(fC)(fA)(mU)(fC)(mU)(fU)(mU)(fG)(mC)(fU)#(mG)#(fA)#(mU)#(mG)#(mU)#(mU)#(fU) | 581 |
| P(mU)#(fU)#(mA)(fA)(fA)(fU)(mU)(fU)(mA)(fA)(mA)(fG)(mA)(fA)#(mG)#(fC)#(mA)#(mA)#(mC)#(mU)#(fU) | 582 |
| P(mU)#(fC)#(mA)(fU)(fA)(fG)(mU)(fU)(mG)(fG)(mG)(fC)(mC)(fU)#(mU)#(fU)#(mA)#(mC)#(mU)#(mU)#(fU) | 583 |
| P(mU)#(fC)#(mA)(fC)(fU)(fG)(mU)(fU)(mG)(fU)(mA)(fG)(mG)(fA)#(mG)#(fU)#(mC)#(mU)#(mC)#(mU)#(fU) | 584 |
| P(mU)#(fC)#(mA)(fA)(fA)(fC)(mA)(fC)(mU)(fG)(mU)(fU)(mG)(fU)#(mA)#(fG)#(mG)#(mA)#(mG)#(mU)#(fU) | 585 |
| P(mU)#(fG)#(mC)(fA)(fA)(fC)(mA)(fC)(mU)(fG)(mU)(fC)(mU)(fU)#(mC)#(fA)#(mC)#(mA)#(mU)#(mU)#(fU) | 586 |
| P(mU)#(fA)#(mG)(fC)(fA)(fU)(mC)(fG)(mU)(fG)(mA)(fU)(mU)(fC)#(mU)#(fG)#(mU)#(mU)#(mG)#(mU)#(fU) | 587 |
| P(mU)#(fA)#(mU)(fA)(fA)(fU)(mC)(fC)(mA)(fA)(mU)(fC)(mC)(fC)#(mA)#(fU)#(mC)#(mC)#(mA)#(mU)#(fU) | 588 |
| P(mU)#(fA)#(mG)(fC)(fG)(fA)(mU)(fA)(mA)(fU)(mC)(fC)(mA)(fA)#(mU)#(fC)#(mC)#(mC)#(mA)#(mU)#(fU) | 589 |
| P(mU)#(fC)#(mA)(fC)(fA)(fC)(mU)(fC)(mU)(fC)(mC)(fA)(mG)(fA)#(mG)#(fC)#(mA)#(mG)#(mU)#(mU)#(fU) | 590 |
| P(mU)#(fC)#(mA)(fA)(fA)(fU)(mU)(fC)(mA)(fC)(mA)(fC)(mU)(fC)#(mU)#(fC)#(mC)#(mA)#(mG)#(mU)#(fU) | 591 |
| P(mU)#(fA)#(mC)(fA)(fA)(fA)(mU)(fU)(mC)(fA)(mC)(fA)(mC)(fU)#(mC)#(fU)#(mC)#(mC)#(mA)#(mU)#(fU) | 592 |
| P(mU)#(fU)#(mA)(fG)(fC)(fA)(mU)(fA)(mU)(fU)(mA)(fA)(mU)(fU)#(mG)#(fG)#(mA)#(mG)#(mA)#(mU)#(fU) | 593 |
| P(mU)#(fA)#(mU)(fA)(fG)(fC)(mA)(fU)(mA)(fU)(mU)(fA)(mA)(fU)#(mU)#(fG)#(mG)#(mA)#(mG)#(mU)#(fU) | 594 |
| P(mU)#(fA)#(mA)(fU)(fA)(fU)(mA)(fG)(mC)(fA)(mU)(fA)(mU)(fU)#(mA)#(fA)#(mU)#(mU)#(mG)#(mU)#(fU) | 595 |
| P(mU)#(fU)#(mU)(fA)(fU)(fU)(mU)(fG)(mU)(fU)(mC)(fU)(mU)(fU)#(mG)#(fC)#(mC)#(mA)#(mU)#(mU)#(fU) | 596 |
| P(mU)#(fA)#(mU)(fU)(fA)(fU)(mU)(fU)(mG)(fU)(mU)(fC)(mU)(fU)#(mU)#(fG)#(mC)#(mC)#(mA)#(mU)#(fU) | 597 |
| P(mU)#(fU)#(mA)(fU)(mU)(fA)(mU)(fU)(mU)(fG)(mU)(fU)(mC)#(fU)#(mU)#(fU)#(mG)#(fC)#(mC)#(fU) | 598 |
| P(mU)#(fA)#(mU)(fA)(fC)(fU)(mG)(fU)(mA)(fG)(mC)(fU)(mU)(fA)#(mU)#(fG)#(mC)#(mU)#(mU)#(mU)#(fU) | 599 |
| P(mU)#(fA)#(mA)(fC)(fC)(fA)(mU)(fU)(mG)(fC)(mA)(fU)(mA)(fU)#(mA)#(fU)#(mU)#(mC)#(mC)#(mU)#(fU) | 600 |
| P(mU)#(fA)#(mA)(fA)(fC)(fU)(mC)(fU)(mG)(fG)(mA)(fA)(mA)(fU)#(mC)#(fA)#(mU)#(mA)#(mA)#(mU)#(fU) | 601 |
| P(mU)#(fG)#(mA)(fU)(fC)(fU)(mC)(fC)(mU)(fU)(mC)(fU)(mA)(fG)#(mC)#(fU)#(mC)#(mA)#(mA)#(mU)#(fU) | 602 |
| P(mU)#(fU)#(mG)(fA)(fU)(fC)(mU)(fC)(mC)(fU)(mU)(fC)(mU)(fA)#(mG)#(fC)#(mU)#(mC)#(mA)#(mU)#(fU) | 603 |
| P(mU)#(fA)#(mU)(fA)(fA)(fA)(mU)(fG)(mU)(fA)(mA)(fU)(mU)(fU)#(mG)#(fA)#(mU)#(mC)#(mU)#(mU)#(fU) | 604 |
| P(mU)#(fA)#(mA)(fC)(fA)(fU)(mA)(fA)(mA)(fU)(mG)(fU)(mA)(fA)#(mU)#(fU)#(mU)#(mG)#(mA)#(mU)#(fU) | 605 |
| P(mU)#(fG)#(mG)(fA)(fA)(fC)(mA)(fU)(mA)(fA)(mA)(fU)(mG)(fU)#(mA)#(fA)#(mU)#(mU)#(mU)#(mU)#(fU) | 606 |
| P(mU)#(fU)#(mA)(fG)(fG)(fA)(mA)(fC)(mA)(fU)(mA)(fA)(mA)(fU)#(mG)#(fU)#(mA)#(mA)#(mU)#(mU)#(fU) | 607 |
| P(mU)#(fG)#(mA)(fU)(fG)(fU)(mU)(fG)(mU)(fA)(mA)(fU)(mA)(fU)#(mA)#(fU)#(mA)#(mG)#(mG)#(mU)#(fU) | 608 |
| P(mU)#(fG)#(mA)(fA)(fU)(fC)(mG)(fC)(mU)(fU)(mU)(fC)(mA)(fU)#(mU)#(fU)#(mC)#(mC)#(mU)#(mU)#(fU) | 609 |
| P(mU)#(fA)#(mU)(fA)(fC)(fU)(mC)(fC)(mU)(fU)(mU)(fA)(mA)(fU)#(mU)#(fC)#(mA)#(mU)#(mC)#(mU)#(fU) | 610 |
| P(mU)#(fA)#(mA)(fU)(fA)(fG)(mA)(fC)(mU)(fU)(mU)(fA)(mA)(fA)#(mG)#(fC)#(mA)#(mU)#(mA)#(mU)#(fU) | 611 |
| P(mU)#(fU)#(mA)(fA)(fA)(fG)(mA)(fA)(mA)(fU)(mA)(fG)(mA)(fC)#(mU)#(fU)#(mU)#(mA)#(mA)#(mU)#(fU) | 612 |
| P(mU)#(fA)#(mA)(fA)(fC)(fU)(mU)(fU)(mA)(fA)(mA)(fG)(mA)(fA)#(mA)#(fU)#(mA)#(mG)#(mA)#(mU)#(fU) | 613 |
| P(mU)#(fA)#(mA)(fU)(fG)(fA)(mU)(fG)(mG)(fU)(mA)(fU)(mA)(fU)#(mA)#(fA)#(mC)#(mA)#(mA)#(mU)#(fU) | 614 |
| P(mU)#(fA)#(mA)(fU)(fG)(fC)(mA)(fG)(mA)(fA)(mA)(fU)(mA)(fU)#(mA)#(fU)#(mU)#(mC)#(mA)#(mU)#(fU) | 615 |
| P(mU)#(fA)#(mG)(fU)(fG)(fU)(mU)(fU)(mA)(fA)(mG)(fG)(mA)(fU)#(mG)#(fA)#(mU)#(mU)#(mC)#(mU)#(fU) | 616 |
| P(mU)#(fA)#(mU)(fA)(fA)(fA)(mU)(fU)(mC)(fA)(mA)(fG)(mU)(fG)#(mU)#(fU)#(mU)#(mA)#(mA)#(mU)#(fU) | 617 |
| P(mU)#(fA)#(mA)(fU)(fA)(fU)(mA)(fA)(mA)(fU)(mU)(fC)(mA)(fA)#(mG)#(fU)#(mG)#(mU)#(mU)#(mU)#(fU) | 618 |
| P(mU)#(fA)#(mU)(fA)(fC)(fA)(mA)(fU)(mA)(fU)(mA)(fA)(mA)(fU)#(mU)#(fC)#(mA)#(mA)#(mG)#(mU)#(fU) | 619 |
| P(mU)#(fC)#(mA)(fU)(fA)(fU)(mG)(fC)(mU)(fG)(mC)(fA)(mC)(fC)#(mA)#(fU)#(mC)#(mC)#(mC)#(mU)#(fU) | 620 |
| P(mU)#(fG)#(mG)(fA)(fA)(fA)(mU)(fU)(mG)(fC)(mA)(fU)(mA)(fU)#(mG)#(fC)#(mU)#(mG)#(mC)#(mU)#(fU) | 621 |
| P(mU)#(fA)#(mA)(fG)(fA)(fU)(mA)(fA)(mU)(fG)(mC)(fA)(mG)(fU)#(mU)#(fU)#(mC)#(mU)#(mC)#(mU)#(fU) | 622 |
| P(mU)#(fA)#(mA)(fA)(fU)(fU)(mA)(fC)(mA)(fU)(mA)(fC)(mU)(fU)#(mC)#(fU)#(mC)#(mC)#(mA)#(mU)#(fU) | 623 |
| P(mU)#(fG)#(mC)(fA)(fG)(fU)(mG)(fU)(mU)(fG)(mC)(fA)(mA)(fA)#(mG)#(fG)#(mC)#(mA)#(mG)#(mU)#(fU) | 624 |
| P(mU)#(fA)#(mA)(fA)(fC)(fU)(mG)(fC)(mA)(fG)(mU)(fG)(mU)(fU)#(mG)#(fC)#(mA)#(mA)#(mA)#(mU)#(fU) | 625 |
| P(mU)#(fA)#(mG)(fA)(fG)(fU)(mC)(fG)(mA)(fU)(mC)(fA)(mU)(fU)#(mU)#(fC)#(mU)#(mA)#(mU)#(mU)#(fU) | 626 |
| P(mU)#(fU)#(mA)(fG)(fA)(fG)(mU)(fC)(mG)(fA)(mU)(fC)(mA)(fU)#(mU)#(fU)#(mC)#(mU)#(mA)#(mU)#(fU) | 627 |
| P(mU)#(fA)#(mA)(fU)(fA)(fU)(mU)(fG)(mA)(fU)(mA)(fG)(mA)(fG)#(mU)#(fC)#(mG)#(mA)#(mU)#(mU)#(fU) | 628 |
| P(mU)#(fA)#(mU)(fA)(fC)(fA)(mA)(fU)(mA)(fU)(mU)(fG)(mA)(fU)#(mA)#(fG)#(mA)#(mG)#(mU)#(mU)#(fU) | 629 |
| P(mU)#(fU)#(mG)(fC)(fA)(fU)(mU)(fG)(mU)(fU)(mU)(fC)(mA)(fG)#(mU)#(fC)#(mU)#(mU)#(mU)#(mU)#(fU) | 630 |
| P(mU)#(fA)#(mU)(fA)(fA)(fA)(mU)(fG)(mC)(fA)(mU)(fU)(mG)(fU)#(mU)#(fU)#(mC)#(mA)#(mG)#(mU)#(fU) | 631 |
| P(mU)#(fA)#(mU)(fA)(fU)(fA)(mA)(fA)(mU)(fG)(mC)(fA)(mU)(fU)#(mG)#(fU)#(mU)#(mU)#(mC)#(mU)#(fU) | 632 |
| P(mU)#(fU)#(mA)(fU)(fA)(fU)(mA)(fA)(mA)(fU)(mG)(fC)(mA)(fU)#(mU)#(fG)#(mU)#(mU)#(mU)#(mU)#(fU) | 633 |
| P(mU)#(fA)#(mU)(fU)(fG)(fU)(mA)(fU)(mA)(fC)(mA)(fU)(mA)(fU)#(mU)#(fA)#(mU)#(mA)#(mU)#(mU)#(fU) | 634 |
| P(mU)#(fA)#(mA)(fU)(fA)(fU)(mU)(fG)(mU)(fA)(mU)(fA)(mC)(fA)#(mU)#(fA)#(mU)#(mU)#(mA)#(mU)#(fU) | 635 |
| P(mU)#(fA)#(mA)(fA)(fC)(fA)(mA)(fU)(mA)(fU)(mU)(fG)(mU)(fA)#(mU)#(fA)#(mC)#(mA)#(mU)#(mU)#(fU) | 636 |
| P(mU)#(fG)#(mA)(fC)(fA)(fC)(mU)(fU)(mA)(fU)(mU)(fU)(mA)(fC)#(mA)#(fA)#(mA)#(mA)#(mC)#(mU)#(fU) | 637 |
| P(mU)#(fG)#(mA)(fG)(fA)(fC)(mA)(fC)(mU)(fU)(mA)(fU)(mU)(fU)#(mA)#(fC)#(mA)#(mA)#(mA)#(mU)#(fU) | 638 |
| P(mU)#(fG)#(mG)(fA)(fG)(fA)(mC)(fA)(mC)(fU)(mU)(fA)(mU)(fU)#(mU)#(fA)#(mC)#(mA)#(mA)#(mU)#(fU) | 639 |
| P(mU)#(fA)#(mG)(fG)(fA)(fG)(mA)(fC)(mA)(fC)(mU)(fU)(mA)(fU)#(mU)#(fU)#(mA)#(mC)#(mA)#(mU)#(fU) | 640 |
| P(mU)#(fA)#(mA)(fA)(fU)(fG)(mU)(fC)(mC)(fU)(mU)(fA)(mG)(fU)#(mG)#(fU)#(mA)#(mA)#(mA)#(mU)#(fU) | 641 |
| P(mU)#(fU)#(mG)(fA)(fA)(fA)(mU)(fG)(mU)(fC)(mC)(fU)(mU)(fA)#(mG)#(fU)#(mG)#(mU)#(mA)#(mU)#(fU) | 642 |
| P(mU)#(fC)#(mU)(fU)(fA)(fA)(mU)(fU)(mU)(fG)(mA)(fA)(mA)(fU)#(mG)#(fU)#(mC)#(mC)#(mU)#(mU)#(fU) | 643 |
| P(mU)#(fC)#(mA)(fC)(fU)(fA)(mU)(fU)(mU)(fA)(mA)(fU)(mC)(fU)#(mG)#(fC)#(mU)#(mA)#(mA)#(mU)#(fU) | 644 |
| P(mU)#(fC)#(mC)(fA)(fC)(fU)(mA)(fU)(mU)(fU)(mA)(fA)(mU)(fC)#(mU)#(fG)#(mC)#(mU)#(mA)#(mU)#(fU) | 645 |
| P(mU)#(fA)#(mC)(fC)(fA)(fC)(mU)(fA)(mU)(fU)(mU)(fA)(mA)(fU)#(mC)#(fU)#(mG)#(mC)#(mU)#(mU)#(fU) | 646 |
| P(mU)#(fA)#(mC)(fC)(fA)(fU)(mC)(fU)(mA)(fA)(mU)(fC)(mA)(fU)#(mU)#(fA)#(mA)#(mC)#(mA)#(mU)#(fU) | 647 |
| P(mU)#(fU)#(mG)(fU)(fA)(fA)(mU)(fA)(mU)(fA)(mA)(fC)(mC)(fA)#(mU)#(fC)#(mU)#(mA)#(mA)#(mU)#(fU) | 648 |
| P(mU)#(fA)#(mU)(fG)(fA)(fU)(mU)(fG)(mU)(fA)(mA)(fU)(mA)(fU)#(mA)#(fA)#(mC)#(mC)#(mA)#(mU)#(fU) | 649 |
| P(mU)#(fG)#(mA)(fA)(fU)(fG)(mU)(fU)(mA)(fA)(mU)(fC)(mA)(fU)#(mG)#(fU)#(mA)#(mA)#(mA)#(mU)#(fU) | 650 |
| P(mU)#(fU)#(mG)(fA)(fA)(fU)(mG)(fU)(mU)(fA)(mA)(fU)(mC)(fA)#(mU)#(fG)#(mU)#(mA)#(mA)#(mU)#(fU) | 651 |
| P(mU)#(fA)#(mA)(fA)(fU)(fU)(mC)(fA)(mC)(fU)(mU)(fU)(mA)(fU)#(mA)#(fC)#(mA)#(mG)#(mC)#(mU)#(fU) | 652 |
| P(mU)#(fA)#(mA)(fA)(fC)(fC)(mA)(fU)(mU)(fG)(mA)(fA)(mA)(fU)#(mU)#(fU)#(mC)#(mA)#(mA)#(mU)#(fU) | 653 |
| P(mU)#(fG)#(mU)(fA)(fA)(fA)(mC)(fC)(mA)(fU)(mU)(fG)(mA)(fA)#(mA)#(fU)#(mU)#(mU)#(mC)#(mU)#(fU) | 654 |
| P(mU)#(fG)#(mA)(fG)(fA)(fU)(mU)(fU)(mA)(fA)(mA)(fC)(mA)(fC)#(mA)#(fA)#(mU)#(mG)#(mA)#(mU)#(fU) | 655 |
| P(mU)#(fA)#(mA)(fC)(fG)(fU)(mU)(fG)(mA)(fG)(mA)(fU)(mU)(fU)#(mA)#(fA)#(mA)#(mC)#(mA)#(mU)#(fU) | 656 |
| P(mU)#(fG)#(mG)(fA)(fA)(fC)(mG)(fU)(mU)(fG)(mA)(fG)(mA)(fU)#(mU)#(fU)#(mA)#(mA)#(mA)#(mU)#(fU) | 657 |
| P(mU)#(fG)#(mA)(fG)(fA)(fU)(mA)(fG)(mC)(fA)(mU)(fC)(mA)(fG)#(mU)#(fU)#(mU)#(mA)#(mU)#(mU)#(fU) | 658 |
| P(mU)#(fA)#(mA)(fC)(fA)(fG)(mU)(fU)(mA)(fU)(mU)(fG)(mU)(fU)#(mG)#(fA)#(mG)#(mA)#(mU)#(mU)#(fU) | 659 |
| P(mU)#(fU)#(mA)(fA)(fC)(fA)(mG)(fU)(mU)(fA)(mU)(fU)(mG)(fU)#(mU)#(fG)#(mA)#(mG)#(mA)#(mU)#(fU) | 660 |
| P(mU)#(fU)#(mU)(fC)(fA)(fU)(mU)(fA)(mU)(fC)(mA)(fA)(mA)(fU)#(mU)#(fA)#(mU)#(mA)#(mA)#(mU)#(fU) | 661 |
| P(mU)#(fG)#(mA)(fA)(fA)(fU)(mA)(fU)(mA)(fU)(mU)(fC)(mA)(fU)#(mU)#(fA)#(mU)#(mC)#(mA)#(mU)#(fU) | 662 |
| P(mU)#(fA)#(mG)(fA)(fA)(fA)(mU)(fA)(mU)(fA)(mU)(fU)(mC)(fA)#(mU)#(fU)#(mA)#(mU)#(mC)#(mU)#(fU) | 663 |
| P(mU)#(fU)#(mG)(fC)(fA)(fG)(mA)(fA)(mA)(fU)(mA)(fU)(mA)(fU)#(mU)#(fC)#(mA)#(mU)#(mU)#(mU)#(fU) | 664 |
| P(mU)#(fA)#(mG)(fU)(fA)(fA)(mA)(fU)(mA)(fA)(mA)(fU)(mG)(fC)#(mA)#(fG)#(mA)#(mA)#(mA)#(mU)#(fU) | 665 |
| P(mU)#(fC)#(mA)(fG)(fA)(fA)(mG)(fU)(mA)(fA)(mA)(fU)(mA)(fA)#(mA)#(fU)#(mG)#(mC)#(mA)#(mU)#(fU) | 666 |
| P(mU)#(fC)#(mA)(fA)(fU)(fA)(mA)(fA)(mU)(fU)(mU)(fG)(mA)(fU)#(mU)#(fA)#(mA)#(mC)#(mA)#(mU)#(fU) | 667 |
| P(mU)#(fA)#(mU)(fA)(fA)(fU)(mU)(fU)(mC)(fA)(mU)(fU)(mU)(fA)#(mG)#(fU)#(mC)#(mA)#(mU)#(mU)#(fU) | 668 |
| P(mU)#(fA)#(mA)(fU)(fA)(fA)(mU)(fU)(mU)(fC)(mA)(fU)(mU)(fU)#(mA)#(fG)#(mU)#(mC)#(mA)#(mU)#(fU) | 669 |
| P(mU)#(fC)#(mA)(fA)(fA)(fU)(mU)(fA)(mG)(fA)(mU)(fG)(mU)(fA)#(mA)#(fG)#(mA)#(mA)#(mA)#(mU)#(fU) | 670 |
| P(mU)#(fC)#(mU)(fA)(fC)(fA)(mA)(fA)(mU)(fU)(mA)(fG)(mA)(fU)#(mG)#(fU)#(mA)#(mA)#(mG)#(mU)#(fU) | 671 |
| P(mU)#(fC)#(mU)(fU)(fA)(fU)(mA)(fC)(mU)(fG)(mU)(fU)(mU)(fC)#(mU)#(fA)#(mC)#(mA)#(mA)#(mU)#(fU) | 672 |
| P(mU)#(fA)#(mA)(fC)(fU)(fU)(mA)(fU)(mA)(fC)(mU)(fG)(mU)(fU)#(mU)#(fC)#(mU)#(mA)#(mC)#(mU)#(fU) | 673 |
| P(mU)#(fU)#(mA)(fU)(fA)(fA)(mC)(fU)(mU)(fA)(mU)(fA)(mC)(fU)#(mG)#(fU)#(mU)#(mU)#(mC)#(mU)#(fU) | 674 |

m is2′-O-methyl nucleosides;
f is 2′-Fluoro nucleosides;
P is 5′-(E)-Vinylphosphonate;
# is phosphorothioate linkage;
TegChol is TEG linker + cholesterol

[0099] In some embodiments, a human MSTN specific siRNA comprises an anti-sense strand that comprises the nucleic acid sequence with chemical modification pattern set forth in Table 5. In some embodiments, a human MSTN specific siRNA comprises an anti-sense strand that comprises the nucleic acid sequence with chemical modification pattern as set forth in SEQ ID NOs: 578-674. In some embodiments, a human MSTN specific siRNA comprises a sense strand that comprises the nucleic acid sequence with chemical modification pattern set forth in Table 5. In some embodiments, a human MSTN specific siRNA comprises a sense strand that comprises the nucleic acid sequence with chemical modification pattern as set forth in SEQ ID NOs: 285-372.

[0100] In some embodiments, a mouse Mstn specific siRNA comprises an anti-sense strand that comprises the nucleic acid sequence with chemical modification pattern set forth in Table 4. In some embodiments, a mouse Mstn specific siRNA comprises an anti-sense strand that comprises the nucleic acid sequence with chemical modification pattern as set forth in SEQ ID NOs: 373-480. In some embodiments, a mouse Mstn specific siRNA comprises a sense strand that comprises the nucleic acid sequence with chemical modification pattern set forth in Table 4. In some embodiments, a mouse Mstn specific siRNA comprises a sense strand that comprises the nucleic acid sequence with chemical modification pattern as set forth in SEQ ID NOs: 481-577.

iv. Bispecific siRNA

[0101] In some aspects, the present disclosure provides bi-specific nucleic acid molecules (e.g., bispecific siRNAs) comprising one or more siRNAs described herein. In some embodiments, bi-specific nucleic acid molecule (e.g., bispecific siRNA) comprises: (i) a first siRNA targeting a first RNA transcript selected from ACVR1^{R206H}, Inhba, IL-1β, TNF, and myostatin (Mstn); linked to (ii) a second siRNA targeting a second RNA transcript selected from ACVR1^{R206H}, Inhba, IL-1β, TNF, and myostatin (Mstn), wherein the first RNA transcript and second RNA transcript are not transcribed from the same gene. In some embodiments, the first siRNA and second siRNA are linked via a linking molecule. In some embodiment, the first siRNA is selected from an siRNA set forth in any one of Tables 1-5. In some embodiments, the second siRNA is selected from an siRNA set forth in any one of Tables 1-5.

[0102] In some embodiments, a bi-specific nucleic acid molecule (e.g., bispecific siRNA) comprises one siRNA specifically targets ACVR1^{R206H} and a second siRNA that specifically targets INHBA, MSTN, IL-1β, or TNF. In some embodiments, any one of the ACVR1^{R206H} specific siRNA described herein can be combined with any one of the INHBA specific siRNA or MSTN specific siRNA described herein. In some embodiments, a bispecific siRNA described herein is divalent. In some embodiments, a bispecific siRNA described herein comprises a chemically modified siRNA scaffold. In some embodiments, a bispecific siRNA described herein targets muscle cells.

### II. Pharmaceutical Composition

[0103] Isolated nucleic acids (e.g., siRNAs) provided herein may be formulated in any suitable manner. Generally, isolated nucleic acids (e.g., siRNAs) provided herein are formulated in a manner suitable for pharmaceutical use as described herein. For example, isolated nucleic acids (e.g., siRNAs) can be delivered to a subject using a formulation that minimizes degradation, facilitates delivery and/or (e.g., and) uptake, and/or (e.g., and) provides another beneficial property to the isolated nucleic acids (e.g., siRNAs) in the formulation. In some embodiments, provided herein are compositions comprising isolated nucleic acids (e.g., siRNAs described herein) and pharmaceutically acceptable excipients. Such compositions can be suitably formulated such that when administered to a subject, either into the immediate environment of a target cell (e.g., cell of the central nervous system, neuron, glial cell, astrocyte, oligodendrocyte, microglial cell and ependymal cell), or systemically, a sufficient amount of the isolated nucleic acids (e.g., siRNAs) enter target cells (e.g., muscle cells). In some embodiments, isolated nucleic acids (e.g., siRNAs described herein) are formulated in buffered solutions, such as phosphate-buffered saline solutions, liposomes, micellar structures, and capsids, for example as described in U.S. Pat. Nos. 9,950,068, 9,050,373, 9,314,529, 8,877,237, US Patent Application Publication No. 20200085974 and US Patent Application Publication No. 20110274745, all of which are herein incorporated by reference. It should be appreciated that, in some embodiments, compositions may include one or more types of nucleic acids provided herein (e.g., siRNAs targeting ACVR1^{R206H}, INHBA, or MSTN).

[0104] In some embodiments, isolated nucleic acids (e.g., siRNAs described herein) are formulated in water or in an aqueous solution (e.g., water with pH adjustments). In some embodiments, isolated nucleic acids (e.g., siRNAs described herein) are formulated in a basic buffered aqueous solution (e.g., PBS) with a pH of 7.2, 7.3, 7.4, 7.5, 7.6, 7.7, 7.8, 7.9, 8.0, 8.1, 8.2, 8.3, 8.4, 8.5, 8.6, 8.7, 8.8, 8.9, 9.0, 9.1, 9.2, 9.3, 9.4, 9.5, 9.6, 9.7, 9.8, 9.9, 10.0, 10.1, 10.2, 10.3, 10.4, 10.5, 10.6, 10.7, 10.8, 10.9, 11.0, 11.1, 11.2, 11.3, 11.4, 11.5, 11.6, 11.7, 11.8, 11.9, 12.0, 12.1, 12.2, 12.3, 12.4, 12.5, 12.6, 12.7, 12.8, 12.9, 13.0, 13.1, 13.2, 13.3, 13.4, 13.5, 13.6, 13.7, 13.8, or 13.9. In some embodiments, formulations as disclosed herein comprise an excipient. In some embodiments, an excipient confers to a composition improved stability, improved absorption, improved solubility, and/or (e.g., and) therapeutic enhancement of the inhibitory nucleic acid. In some embodiments, an excipient is a buffering agent (e.g., sodium citrate, sodium phosphate, a tris base, or sodium hydroxide), a sugar (e.g., lactose, sucrose, mannitol or sorbitol), a vehicle (e.g., a buffered solution, petrolatum, dimethyl sulfoxide, alcohol, or mineral oil, micelle, liposome, capsid, lipid nanoparticle), a salt, a cellulose preparation, a polymer, a lipid, an antioxidant, a preservative, a calcium phosphate, a binder (e.g., starch, gelatin, methyl cellulose, hydroxypropyl methylcellulose, sodium carboxymethylcellulose, and/or polyvinyl pyrrolidone), or any combination thereof.

[0105] In some embodiments, isolated nucleic acids (e.g., siRNAs described herein) is lyophilized for extending its shelf-life and then made into a solution before use (e.g., before administration to a subject). Accordingly, an excipient in a composition comprising isolated nucleic acids (e.g., siRNAs described herein) described herein may be a lyoprotectant (e.g., mannitol, lactose, polyethylene glycol, or polyvinyl pyrolidone) or a collapse temperature modifier (e.g., dextran, ficoll, or gelatin).

[0106] In some embodiments, a pharmaceutical composition is formulated to be compatible with its intended route of administration. As used herein, the terms “administering” or “administration” means to provide isolated nucleic acids (e.g., siRNAs described herein) to a subject in a manner that is physiologically and/or (e.g., and) pharmacologically useful (e.g., to treat a condition in the subject). Examples of routes of administration include parenteral, e.g., intravenous, intradermal, subcutaneous, administration, or direct administration to the CNS (e.g., intracerebral injection, intraventricular injection, intracisternal injection, intraparenchymal injection, intrathecal injection, and any combination of the foregoing). Pharmaceutical compositions suitable for injectable use include sterile aqueous solutions (where water soluble) or dispersions and sterile powders for the instant preparation of sterile injectable solutions or dispersions. The excipient can be a solvent or dispersion medium containing, for example, water, ethanol, polyol (for example, glycerol, propylene glycol, liquid polyethylene glycol, and the like), and suitable mixtures thereof. In some embodiments, formulations include isotonic agents, for example, sugars, polyalcohols such as mannitol, sorbitol, and sodium chloride, in the composition. Sterile injectable solutions can be prepared by incorporating the isolated nucleic acids (e.g., siRNAs described herein) in a required amount in a selected solvent with one or a combination of ingredients enumerated above, as required, followed by filtered sterilization.

[0107] In some embodiments, a composition may contain at least about 0.1%, at least about 0.5%, at least about 1%, at least about 2%, at least about 3%, at least about 4%, at least about 5%, at least about 10%, at least about 12%, at least about 15%, at least about 18%, or at least about 20% isolated nucleic acids (e.g., siRNAs described herein) described herein, or more, although the percentage of the isolated nucleic acids (e.g., siRNAs described herein) may be between about 1% and about 80% or more of the weight or volume of the total composition. Factors such as solubility, bioavailability, biological half-life, route of administration, product shelf life, as well as other pharmacological considerations will be contemplated by one skilled in the art of preparing such pharmaceutical formulations, and as such, a variety of dosages and treatment regimens may be desirable.

### III. Therapeutic Applications

[0108] Isolated nucleic acids (e.g., ACVRR^{206H} specific siRNAs) described herein are effective in treating, preventing, slowing the progression and/or reversing FOP in a subject having, suspected of having FOP, or susceptible of developing FOP (e.g., carrying the ACVRR^{206H} allele). In some embodiments, bispecific siRNAs comprising an ACVRR^{206H} specific siRNAs and a siRNA targeting INHBA, MSTN, TNF, or IL-1β can also be used to treat or prevent FOP. In some embodiments, the present disclosure provides methods for treating FOP, the methods comprising administering a subject having FOP an ACVRR^{206H} specific siRNA described herein. In some embodiments, the present disclosure provides methods for treating FOP, the methods comprising administering a subject having FOP a bi-specific siRNA described herein.

[0109] In some embodiments, ACVRR^{206H} specific siRNAs are effective in treating FOP. In some embodiments, ACVRR^{206H} specific siRNAs are effective in preventing, slowing the progression and/or reversing FOP.

[0110] In some embodiments, a subject may be a human subject, a non-human primate subject, a rodent subject, or any other suitable mammalian subject. In some embodiments, a subject may have FOP. In some embodiments, a subject is suffering from one or more symptoms of FOP, e.g., bone forming on muscles, ligaments and connective tissue, decreased mobility (scooting instead of crawling, joint stiffness, locked joints), difficulty eating or speaking, hearing impairment, malformed big toe, and/or permanent immobility. In some embodiments, a subject is not yet suffering from any symptoms of FOP.

[0111] An aspect of the disclosure includes a method involving administering to a subject an effective amount of ACVRR^{206H} specific siRNAs or the bispecific siRNA as described herein. In some embodiments, an effective amount of a pharmaceutical composition that comprises an ACVRR^{206H} specific siRNAs or the bispecific siRNA can be administered to a subject in need of treatment. In some embodiments, a pharmaceutical composition comprising ACVRR^{206H} specific siRNAs or the bispecific siRNA as described herein may be administered by a suitable route, which may include intravenous administration, e.g., as a bolus or by continuous infusion over a period of time, or by direct injection into the target tissue (e.g., muscle). In some embodiments, a pharmaceutical composition may be in solid form, aqueous form, or a liquid form. In some embodiments, an aqueous or liquid form may be lyophilized. In some embodiments, a lyophilized form may be reconstituted with an aqueous or liquid solution.

[0112] Compositions for intravenous administration may contain various carriers, such as vegetable oils, dimethylactamide, dimethyformamide, ethyl lactate, ethyl carbonate, isopropyl myristate, ethanol, and polyols (glycerol, propylene glycol, liquid polyethylene glycol, and the like). For intravenous injection, water soluble inhibitory nucleic acids can be administered by the drip method, whereby a pharmaceutical formulation containing the inhibitory nucleic acids and physiologically acceptable excipients is infused. Physiologically acceptable excipients may include, for example, 5% dextrose, 0.9% saline, Ringer's solution or other suitable excipients. Intramuscular preparations, can be dissolved and administered in a pharmaceutical excipient such as Water-for-Injection, 0.9% saline, or 5% glucose solution.

[0113] In some embodiments, a pharmaceutical composition that comprises ACVRR^{206H} specific siRNAs or the bispecific siRNA is administered via site-specific or local delivery techniques, e.g., direct injection into the target tissue (e.g., muscle).

[0114] In some embodiments, a pharmaceutical composition that comprises ACVRR^{206H} specific siRNAs or the bispecific siRNA is administered at an effective concentration that confers a therapeutic effect on the subject. Effective amounts vary, as recognized by those skilled in the art, depending on the severity of the disease, unique characteristics of the subject being treated, e.g. age, physical conditions, health, or weight, the duration of the treatment, the nature of any concurrent therapies, the route of administration and related factors. These related factors are known to those in the art and may be addressed with no more than routine experimentation. In some embodiments, an effective concentration is the maximum dose that is considered to be safe for the patient. In some embodiments, an effective concentration will be the lowest possible concentration that provides maximum efficacy.

[0115] Empirical considerations, e.g. the half-life of the ACVRR^{206H} specific siRNAs or the bispecific siRNA in a subject, generally will contribute to determination of the concentration of pharmaceutical composition that is used for treatment. The frequency of administration may be empirically determined and adjusted to maximize the efficacy of the treatment.

[0116] The efficacy of treatment may be assessed using any suitable methods. In some embodiments, the efficacy of treatment may be assessed by evaluation of symptoms associated with FOP, through measures of a subject's self-reported outcomes, e.g. mobility, self-care, usual activities, pain/discomfort, and anxiety/depression, or other wellness and quality-of-life indicators.

[0117] In some embodiments, a pharmaceutical composition that comprises ACVRR^{206H} specific siRNAs or the bispecific siRNA described herein is administered to a subject at an effective concentration sufficient to inhibit the activity or expression of a target gene (e.g., ACVR1^{R206H}) by at least 10%, at least 20%, at least 30%, at least 40%, at least 50%, at least 60%, at least 70%, at least 80%, at least 90%, or at least 95% relative to a control, e.g. baseline level of gene expression prior to treatment, or compared to a control population.

[0118] In some embodiments, a single dose or administration of a pharmaceutical composition that comprises an ACVR1^{206H} specific siRNA or the bispecific siRNA described herein to a subject is sufficient to inhibit activity or expression of ACVRR^{206H} for at least 1-5, 1-10, 5-15, 10-20, 15-30, 20-40, 25-50, or more days. In some embodiments, a single dose or administration of a pharmaceutical composition that comprises an ACVRR^{206H} specific siRNA or the bispecific siRNA described herein to a subject is sufficient to inhibit the activity or expression of ACVRR^{206H} for at least 1, 2, 3, 4, 5, 6, 7, 8, 9, 10, 11, 12, 15, 20, or 24 weeks. In some embodiments, a single dose or administration of a pharmaceutical composition that comprises an ACVRR^{206H} specific siRNA or the bispecific siRNA described herein to a subject is sufficient to inhibit activity or expression of a target gene for at least 1-5, 1-10, 2-5, 2-10, 4-8, 4-12, 5-10, 5-12, 5-15, 8-12, 8-15, 10-12, 10-15, 10-20, 12-15, 12-20, 15-20, or 15-25 weeks. In some embodiments, a single dose or administration of a pharmaceutical composition that comprises an ACVR1^{206H} specific siRNA or the bispecific siRNA described herein to a subject is sufficient to inhibit the activity or expression of a ACVR1^{206H} for at least 1, 2, 3, 4, 5, or 6 months.

[0119] In some embodiments, a pharmaceutical composition may comprise more than one an ACVR1^{206H} specific siRNA or the bispecific siRNA. In some embodiments, a pharmaceutical composition may further comprise any other suitable therapeutic agent for treatment of a subject, e.g., a human subject having FOP. In some embodiments, the other therapeutic agents may enhance or supplement the effectiveness of the ACVR1^{206H} specific siRNA or the bispecific siRNA described herein. In some embodiments, the other therapeutic agents may function to treat a different symptom or disease than the an ACVR1^{206H} specific siRNA or the bispecific siRNA described herein. In some embodiments, the pharmaceutical composition is for use in treating, preventing, slowing the progression and/or reversing HO in a subject having FOP.

### EXAMPLES

[0120] Fibrodysplasia ossfficans progressiva (FOP, OMIM 135100) is an ultra-rare genetic disorder with a defining feature of progressive, disabling heterotopic ossification (HO) that forms within skeletal muscle, tendons, ligaments, fascia and aponeuroses. HO develops in childhood and early adulthood during episodic flare-ups that occur spontaneously or are triggered by minor trauma, injury, intramuscular injection or inflammation. The new bone leads to progressive immobility and severe pain. In some cases, patients with FOP have heterozygous, gain-of/function mutations in the bone morphogenetic protein (BMP) type I receptor ACVR1. About 97% of FOP patients harbor a ACVR1R^{206H} mutation (c.617G>A;p.R206H). Recent studies showed that ACVR1R^{206H} confers dysregulated BMP-pSMAD1/5 signaling in response to Activin A, which normally inhibits BMP signaling through the wild-type (WT) ACVR1 receptor.

[0121] FOP treatment is challenging due to the early age of onset of ectopic bone formation and the difficulty in selectively suppressing BMP signaling by the ACVR1^{R206H} mutation. Presently, there is no definitive prevention or treatment for the progressively disabling HO except for symptomatic management with high-dose corticosteroids for episodic flare-ups.

[0122] For FOP patients harboring a heterozygous, gain-of-function ACVR1^{R206H} mutation (c.617G>A;p.R206H), selective silencing of ACVR1^{R206H} allele via single nucleotide polymorphism (SNP) heterozygosity would be effective in treating FOP. Using a fully chemically modified siRNA scaffold, we developed siRNA that can selectively silence human ACVR1R^{206H} allele, but not the wild type allele, in human FOP-patient derived induced pluripotent stem cells (iPSCs) and mouse bone marrow-derived stromal cells (BMSCs) expressing human ACVR1^{R206H} receptor.

[0123] For efficient, sustainable, sequence-specific gene silencing in skeletal muscles without any induction of pro-inflammatory cytokines, ACVR1^{R206H} allele-specific siRNA was conjugated to DCA. Further, by using a divalent, chemically modified siRNA scaffold, a muscle targeting, bi-specific siRNAs that enables ACVR1^{R206H} allele-specific silencing and Activin A silencing simultaneously were also developed.

[0124] The following examples describe development of chemically-modified, muscle-targeting siRNAs for silencing of genes associated with FOP, for example ACVR1 and Inhba. FIG. 1 provides a schematic depicting structural features of siRNAs and bi-specific siRNA molecules for use in treatment of FOP.

### Example 1

[0125] This example describes development of chemically-modified siRNAs that silence ACVR^{R206H} in an allele-specific manner. A panel of sixteen chemically-stabilized siRNAs overlapping single nucleotide polymorphisms (SNPs) of human ACVR1^{R206H} were produced, as described in Table 1. The siRNAs contained an alternating pattern of 2′-O-methyl (2′-OMe) and deoxy-2′-fluoro (2′-F) ribose modifications and terminal backbone modifications with phosphorothioate (PS); the sense strand of the siRNA was conjugated to cholesterol. At least one sequence mismatch (e.g., SNP) of ACVR1^{R206H} and wild-type ACVR1 was included in each siRNA (Table 2).

[0126] The siRNAs were screened using mouse BMSCs expressing human ACVR1^{R206H} receptor. Cells were treated with siRNAs for two days and knockdown efficiency was assessed by qPCR. All but two of the tested siRNAs were highly effective in silencing human ACVR1^{R206H} expression. A moderate to significant decrease in Activin A-induced expression of Msx2 was also observed for several of the siRNAs (SNP2, 3, 4, 5, 6, 8, 9, 10, 11, 13, 15, and 16). Additionally, SNP3, SNP6, SNP8, SNP9, and SNP15 were observed to be effective in silencing both ACVR1^{R206H} expression and aberrant Activin A signaling in FOP BMSCs (FIG. 2).

[0127] The ability of the siRNAs to silence ACVR1^{R206H} in an allele-specific manner was investigated using FOP patient-derived iPSCs heterozygous for the ACVR1^{R206H} allele. SNP6, SNP8, and SNP9 were observed to silence ACVR1^{R206H} moderately more than wild-type ACVR1 (FIG. 3). SNP-based allele-specific silencing of ACVR1^{R206H} was also tested using a luciferase sensor system. 293T cells were transfected with a sensor plasmid and treated with siRNAs in a 7-point dose response curve, and luciferase activity was measured. The siRNAs having SNP in positions 6, 8, 9, and 15 were observed to silence ACVR1^{R206H} with discrimination between ACVR1 alleles.

[0128] In order to improve allele discrimination, siRNAs having two SNP mismatches to human wild-type ACVR1 and one mismatch to ACVR1^{R206H} were tested, as shown in Table 2. SNP6 and SNP8 were further modified to include an additional mismatch to wild-type ACVR1 at position 7, 8, 9, or 11, and evaluated in a seven-point dose response curve (FIG. 4). Data indicate that siRNAs having mismatches at positions 6 and 9 (SNP6-9) showed the highest discrimination between ACVR1 alleles, increasing greater than 50-fold relative to controls (FIG. 5)

[0129] To determine whether SNP6-9 could discriminate between wild-type ACVR1 and ACVR1^{R206H} mRNA in a native human context, human FOP patient-derived iPSCs were treated with a control or SNP6-9 siRNA and samples were subjected to Sanger sequencing or next-generation sequencing (NGS) analysis. Sanger sequencing data indicates a shift from c.617A to c.617G in FOP iPSCs when treated with SNP-6-9. This is consistent with NGS analysis of SNP6-9 treated cells showing a significant decrease in ACVR1^{R206H} ratios (3.48%) and an increase in wild-type ACVR1 ratios (96.52%), compared to NTC-treated FOP cells showing 80.58% ACVR1^{206H} vs. 19.42% wild-type ACVR1 (FIG. 6A). Notably, reduced expression of ACVR1^{206H} receptor in SNP6-9 treated cells blunted Activin A-induced expression of Id1, indicating that SNP6-9 siRNA is highly-selective in silencing ACVR1^{R206H} expression and potent to suppress aberrant Activin A signaling in human FOP cells.

[0130] To examine inhibitory effects of SNP6-9 on osteogenic differentiation of FOP cells, ACVR1^{R206H/prx1} BMSCs were cultured under osteogenic conditions in the presence of SNP6-9. mRNA and protein levels of ACVR1^{R206H} were examined by qPCR and immunoblotting analyses, demonstrating dose-responsive knockdown of human ACVR1^{R206H} protein expression (FIG. 6B). Likewise, SNP6-9 treatment abolished human ACVR1^{R206H} protein expression in 293T cells (FIG. 6B). This is accompanied with a dose-responsive decrease in the expression of osteogenic genes, including osteocalcin (Balp), type 1 collagen alpha-1 (Col1a1), and bone sialoprotein (Ibsp), indicating that SNP6-9 is a potent suppressor of ACVR1R^{206H}-induced osteogenesis in FOP BMSCs.

[0131] Given that the ACVR1^{R206H} mutation activates Smad1/5-mediated BMP pathway signaling in response to Activin A, the ability of SNP6-9 to suppress Activin A signaling in ACVR1R^{206H/prx1} BMSCs was investigated. Smad1/5 phosphorylation in NTC-treated cells occurred at 15 minutes or 30 minutes after Activin A stimulation, but this phosphorylation was markedly reduced in the presence of SNP6-9 (FIG. 7). Additionally, SNP6-9 treatment markedly reduced Activin A-induced Id1 expression, alkaline phosphatase activity (an early osteogenic marker) and mineral deposit (a late osteogenic marker) in a dose-dependent manner. A single IM injection of SNP6-9 conjugated to docosanoic acid (DCA) was also observed to reduce HO in vivo in a mouse model of FOP (FIG. 8).

### Example 2

[0132] This example describes development of chemically-modified siRNAs that silence mouse or human Inhba. A panel chemically-stabilized siRNAs overlapping single nucleotide polymorphisms (SNPs) of human Inhba were produced, as described in Table 3. The siRNAs contained an alternating pattern of 2′-O-methyl (2′-OMe) and deoxy-2′-fluoro (2′-F) ribose modifications and terminal backbone modifications with phosphorothioates (PS); the sense strand of the siRNA was conjugated to cholesterol.

[0133] The siRNAs were screened in mouse ACVR^{R206H/prx1} BMSCs or human BMSCs, using qPCR, ELISA and immunoblotting analyses. Cells were treated for two days with 0.5 μM siRNA, stimulated with LPS for 8 hours, and mRNA levels of Inhba were measured. Secreted Activin A protein in the cell supernatant was also measured, and intracellular expression of Inhba protein was confirmed by ELISA (FIG. 9). Three mouse Inhba-targeting siRNAs were selected for further investigation in a seven-point dose response curve. siRNA7 was identified as being the most effective siRNA for silencing mouse Inhba (FIG. 9). Six human Inhba-targeting siRNAs were also selected for further investigation in a seven-point dose response curve. siRNA35 was identified as being the most effective siRNA for silencing human Inhba (FIG. 10).

### Example 3

[0134] This example describes in vivo silencing of ACVR1^{R206H} using DCA-conjugated siRNAs. Fluorescently-labeled siRNA SNP6-9 was intramuscularly injected into a mouse model of FOP with injury-induced HO three days after muscle injury. Four weeks later, siRNA expression in individual tissues was measured using an optical imaging system. Data indicate that siRNA-treated mice showed strong fluorescence in skeletal muscle and moderate expression in liver (FIG. 8). SNP6-9 treatment markedly reduced mRNA levels of ACVR1^{R206H}, and micro CT analysis showed a significant decrease in heterotopic bone mass in treated muscle (FIG. 8), indicating local delivery of SNP6-9 suppresses trauma-induced HO in vivo.

### Example 4

[0135] This example describes conjugation of docosanoic acid (DCA) to siRNAs in order to improve muscle tissue targeting. To examine the ability of DCA-conjugated siRNAs to transfect skeletal muscle, where HO primarily develops in FOP mice, fluorescently-tagged DCA-siRNAs were administered to a mouse model of FOP by intramuscular injection. Injured muscle tissue was then harvested and analyzed at serial timepoints to assess siRNA distribution during HI pathogenesis using fluorescence microscopy. Data indicate that at 3- and 6-days post-injury, fluorescence was detected in damaged muscle fibers and infiltrated immunes cells but not in highly-proliferative fibrotic tissues. Likewise, there was little to no fluorescence in the cartilage analgen and heterotopic bone in the HO lesions 12-16 days post-injury, indicating fluorescence in these cells may disappear due to dilution of siRNAs in highly proliferating cells (FIG. 12). siRNA were also administered to the mice 12 and 16-days post-injury, where cartilage analgen and heterotopic bone was fully developed (FIG. 12). Data indicate that muscle fibers, chondrocytes within the cartilage analgen, osteoblasts, and osteocytes within heterotopic bone were all transfected with the DCA-siRNAs, demonstrating high transfection efficiency in HO-causing cell types (e.g., immune cells, chondrocytes, myoblasts/myocytes, etc.), when locally administered.

### Example 5

[0136] This example describes bi-specific siRNAs targeting genes associated with FOP. In some embodiments, the bi-specific siRNAs comprise a first chemically-modified siRNA targeting a gene selected from ACVR1^{R206H}, Inhba, IL-1β, TNF, and myostatin (Mstn), linked to a second chemically-modified siRNA targeting a gene selected from ACVR1^{R206H}, Inhba, IL-1β, TNF, and myostatin (Mstn), where the first and second siRNAs do not target the same gene. In some embodiments, the bi-specific siRNAs are conjugated to DCA, for example by a cleavable linker. Representative structures of the bi-specific siRNAs are shown in FIG. 11. Examples of siRNAs targeting Mstn are shown in Tables 4 and 5.

The application's sequence listing, which the Patent Office published only in electronic form, follows.

SEQUENCE LISTING (1939 sequences)

SEQ ID NO: 1 - RNA, 16 nt, synthetic construct
  source 1..16: mol_type = other RNA
  modified_base order(1,2,3,5,7,9,11,12,13,15,16): mod_base = OTHER; note = 2prime-O-methyl nucleosides
  modified_base order(4,6,8,10,14): mod_base = OTHER; note = 2prime-Fluoro nucleosides
  modified_base order(1..3,14..16): mod_base = OTHER; note = Phosphorothioate linkage
aagaacagtggctcaa

SEQ ID NO: 2 - RNA, 16 nt, synthetic construct
  source 1..16: mol_type = other RNA
  modified_base order(1,2,3,5,7,9,11,12,13,15,16): mod_base = OTHER; note = 2prime-O-methyl nucleosides
  modified_base order(4,6,8,10,14): mod_base = OTHER; note = 2prime-Fluoro nucleosides
  modified_base order(1..3,14..16): mod_base = OTHER; note = Phosphorothioate linkage
agaacagtggctcaca

SEQ ID NO: 3 - RNA, 16 nt, synthetic construct
  source 1..16: mol_type = other RNA
  modified_base order(1,2,3,5,7,9,11,12,13,15,16): mod_base = OTHER; note = 2prime-O-methyl nucleosides
  modified_base order(4,6,8,10,14): mod_base = OTHER; note = 2prime-Fluoro nucleosides
  modified_base order(1..3,14..16): mod_base = OTHER; note = Phosphorothioate linkage
gaacagtggctcacca

SEQ ID NO: 4 - RNA, 16 nt, synthetic construct
  source 1..16: mol_type = other RNA
  modified_base order(1,2,3,5,7,9,11,12,13,15,16): mod_base = OTHER; note = 2prime-O-methyl nucleosides
  modified_base order(4,6,8,10,14): mod_base = OTHER; note = 2prime-Fluoro nucleosides
  modified_base order(1..3,14..16): mod_base = OTHER; note = Phosphorothioate linkage
aacagtggctcaccaa

SEQ ID NO: 5 - RNA, 16 nt, synthetic construct
  source 1..16: mol_type = other RNA
  modified_base order(1,2,3,5,7,9,11,12,13,15,16): mod_base = OTHER; note = 2prime-O-methyl nucleosides
  modified_base order(4,6,8,10,14): mod_base = OTHER; note = 2prime-Fluoro nucleosides
  modified_base order(1..3,14..16): mod_base = OTHER; note = Phosphorothioate linkage
acagtggctcaccaga

SEQ ID NO: 6 - RNA, 16 nt, synthetic construct
  source 1..16: mol_type = other RNA
  modified_base order(1,2,3,5,7,9,11,12,13,15,16): mod_base = OTHER; note = 2prime-O-methyl nucleosides
  modified_base order(4,6,8,10,14): mod_base = OTHER; note = 2prime-Fluoro nucleosides
  modified_base order(1..3,14..16): mod_base = OTHER; note = Phosphorothioate linkage
cagtggctcaccagaa

SEQ ID NO: 7 - RNA, 16 nt, synthetic construct
  source 1..16: mol_type = other RNA
  modified_base order(1,2,3,5,7,9,11,12,13,15,16): mod_base = OTHER; note = 2prime-O-methyl nucleosides
  modified_base order(4,6,8,10,14): mod_base = OTHER; note = 2prime-Fluoro nucleosides
  modified_base order(1..3,14..16): mod_base = OTHER; note = Phosphorothioate linkage
agtggctcaccagata

SEQ ID NO: 8 - RNA, 16 nt, synthetic construct
  source 1..16: mol_type = other RNA
  modified_base order(1,2,3,5,7,9,11,12,13,15,16): mod_base = OTHER; note = 2prime-O-methyl nucleosides
  modified_base order(4,6,8,10,14): mod_base = OTHER; note = 2prime-Fluoro nucleosides
  modified_base order(1..3,14..16): mod_base = OTHER; note = Phosphorothioate linkage
gtggctcaccagatta

SEQ ID NO: 9 - RNA, 16 nt, synthetic construct
  source 1..16: mol_type = other RNA
  modified_base order(1,2,3,5,7,9,11,12,13,15,16): mod_base = OTHER; note = 2prime-O-methyl nucleosides
  modified_base order(4,6,8,10,14): mod_base = OTHER; note = 2prime-Fluoro nucleosides
  modified_base order(1..3,14..16): mod_base = OTHER; note = Phosphorothioate linkage
tggctcaccagattaa

SEQ ID NO: 10 - RNA, 16 nt, synthetic construct
  source 1..16: mol_type = other RNA
  modified_base order(1,2,3,5,7,9,11,12,13,15,16): mod_base = OTHER; note = 2prime-O-methyl nucleosides
  modified_base order(4,6,8,10,14): mod_base = OTHER; note = 2prime-Fluoro nucleosides
  modified_base order(1..3,14..16): mod_base = OTHER; note = Phosphorothioate linkage
ggctcaccagattaca

SEQ ID NO: 11 - RNA, 16 nt, synthetic construct
  source 1..16: mol_type = other RNA
  modified_base order(1,2,3,5,7,9,11,12,13,15,16): mod_base = OTHER; note = 2prime-O-methyl nucleosides
  modified_base order(4,6,8,10,14): mod_base = OTHER; note = 2prime-Fluoro nucleosides
  modified_base order(1..3,14..16): mod_base = OTHER; note = Phosphorothioate linkage
gctcaccagattacaa

SEQ ID NO: 12 - RNA, 16 nt, synthetic construct
  source 1..16: mol_type = other RNA
  modified_base order(1,2,3,5,7,9,11,12,13,15,16): mod_base = OTHER; note = 2prime-O-methyl nucleosides
  modified_base order(4,6,8,10,14): mod_base = OTHER; note = 2prime-Fluoro nucleosides
  modified_base order(1..3,14..16): mod_base = OTHER; note = Phosphorothioate linkage
ctcaccagattacaca

SEQ ID NO: 13 - RNA, 16 nt, synthetic construct
  source 1..16: mol_type = other RNA
  modified_base order(1,2,3,5,7,9,11,12,13,15,16): mod_base = OTHER; note = 2prime-O-methyl nucleosides
  modified_base order(4,6,8,10,14): mod_base = OTHER; note = 2prime-Fluoro nucleosides
  modified_base order(1..3,14..16): mod_base = OTHER; note = Phosphorothioate linkage
tcaccagattacacta

SEQ ID NO: 14 - RNA, 16 nt, synthetic construct
  source 1..16: mol_type = other RNA
  modified_base order(1,2,3,5,7,9,11,12,13,15,16): mod_base = OTHER; note = 2prime-O-methyl nucleosides
  modified_base order(4,6,8,10,14): mod_base = OTHER; note = 2prime-Fluoro nucleosides
  modified_base order(1..3,14..16): mod_base = OTHER; note = Phosphorothioate linkage
caccagattacactga

SEQ ID NO: 15 - RNA, 16 nt, synthetic construct
  source 1..16: mol_type = other RNA
  modified_base order(1,2,3,5,7,9,11,12,13,15,16): mod_base = OTHER; note = 2prime-O-methyl nucleosides
  modified_base order(4,6,8,10,14): mod_base = OTHER; note = 2prime-Fluoro nucleosides
  modified_base order(1..3,14..16): mod_base = OTHER; note = Phosphorothioate linkage
accagattacactgta

SEQ ID NO: 16 - RNA, 16 nt, synthetic construct
  source 1..16: mol_type = other RNA
  modified_base order(1,2,3,5,7,9,11,12,13,15,16): mod_base = OTHER; note = 2prime-O-methyl nucleosides
  modified_base order(4,6,8,10,14): mod_base = OTHER; note = 2prime-Fluoro nucleosides
  modified_base order(1..3,14..16): mod_base = OTHER; note = Phosphorothioate linkage
ccagattacactgtta

SEQ ID NO: 17 - RNA, 21 nt, synthetic construct
  source 1..21: mol_type = other RNA
  modified_base order(1,3,7,9,11,13,15,17,18,19,20): mod_base = OTHER; note = 2prime-O-methyl nucleosides
  modified_base order(2,4,5,6,8,10,12,14,16,21): mod_base = OTHER; note = 2prime-Fluoro nucleosides
  modified_base order(1..3,14..21): mod_base = OTHER; note = Phosphorothioate linkage
  modified_base 1: mod_base = OTHER; note = 5prime-(E)-Vinylphosphonate
ttgagccactgttctttgtaa

SEQ ID NO: 18 - RNA, 21 nt, synthetic construct
  source 1..21: mol_type = other RNA
  modified_base order(1,3,7,9,11,13,15,17,18,19,20): mod_base = OTHER; note = 2prime-O-methyl nucleosides
  modified_base order(2,4,5,6,8,10,12,14,16,21): mod_base = OTHER; note = 2prime-Fluoro nucleosides
  modified_base order(1..3,14..21): mod_base = OTHER; note = Phosphorothioate linkage
  modified_base 1: mod_base = OTHER; note = 5prime-(E)-Vinylphosphonate
tgtgagccactgttctttgta

SEQ ID NO: 19 - RNA, 21 nt, synthetic construct
  source 1..21: mol_type = other RNA
  modified_base order(1,3,7,9,11,13,15,17,18,19,20): mod_base = OTHER; note = 2prime-O-methyl nucleosides
  modified_base order(2,4,5,6,8,10,12,14,16,21): mod_base = OTHER; note = 2prime-Fluoro nucleosides
  modified_base order(1..3,14..21): mod_base = OTHER; note = Phosphorothioate linkage
  modified_base 1: mod_base = OTHER; note = 5prime-(E)-Vinylphosphonate
tggtgagccactgttctttga

SEQ ID NO: 20 - RNA, 21 nt, synthetic construct
  source 1..21: mol_type = other RNA
  modified_base order(1,3,7,9,11,13,15,17,18,19,20): mod_base = OTHER; note = 2prime-O-methyl nucleosides
  modified_base order(2,4,5,6,8,10,12,14,16,21): mod_base = OTHER; note = 2prime-Fluoro nucleosides
  modified_base order(1..3,14..21): mod_base = OTHER; note = Phosphorothioate linkage
  modified_base 1: mod_base = OTHER; note = 5prime-(E)-Vinylphosphonate
ttggtgagccactgttcttta

SEQ ID NO: 21 - RNA, 21 nt, synthetic construct
  source 1..21: mol_type = other RNA
  modified_base order(1,3,7,9,11,13,15,17,18,19,20): mod_base = OTHER; note = 2prime-O-methyl nucleosides
  modified_base order(2,4,5,6,8,10,12,14,16,21): mod_base = OTHER; note = 2prime-Fluoro nucleosides
  modified_base order(1..3,14..21): mod_base = OTHER; note = Phosphorothioate linkage
  modified_base 1: mod_base = OTHER; note = 5prime-(E)-Vinylphosphonate
tctggtgagccactgttctta

SEQ ID NO: 22 - RNA, 21 nt, synthetic construct
  source 1..21: mol_type = other RNA
  modified_base order(1,3,7,9,11,13,15,17,18,19,20): mod_base = OTHER; note = 2prime-O-methyl nucleosides
  modified_base order(2,4,5,6,8,10,12,14,16,21): mod_base = OTHER; note = 2prime-Fluoro nucleosides
  modified_base order(1..3,14..21): mod_base = OTHER; note = Phosphorothioate linkage
  modified_base 1: mod_base = OTHER; note = 5prime-(E)-Vinylphosphonate
ttctggtgagccactgttcta

SEQ ID NO: 23 - RNA, 21 nt, synthetic construct
  source 1..21: mol_type = other RNA
  modified_base order(1,3,7,9,11,13,15,17,18,19,20): mod_base = OTHER; note = 2prime-O-methyl nucleosides
  modified_base order(2,4,5,6,8,10,12,14,16,21): mod_base = OTHER; note = 2prime-Fluoro nucleosides
  modified_base order(1..3,14..21): mod_base = OTHER; note = Phosphorothioate linkage
  modified_base 1: mod_base = OTHER; note = 5prime-(E)-Vinylphosphonate
tatctggtgagccactgttca

SEQ ID NO: 24 - RNA, 21 nt, synthetic construct
  source 1..21: mol_type = other RNA
  modified_base order(1,3,7,9,11,13,15,17,18,19,20): mod_base = OTHER; note = 2prime-O-methyl nucleosides
  modified_base order(2,4,5,6,8,10,12,14,16,21): mod_base = OTHER; note = 2prime-Fluoro nucleosides
  modified_base order(1..3,14..21): mod_base = OTHER; note = Phosphorothioate linkage
  modified_base 1: mod_base = OTHER; note = 5prime-(E)-Vinylphosphonate
taatctggtgagccactgtta

SEQ ID NO: 25 - RNA, 21 nt, synthetic construct
  source 1..21: mol_type = other RNA
  modified_base order(1,3,7,9,11,13,15,17,18,19,20): mod_base = OTHER; note = 2prime-O-methyl nucleosides
  modified_base order(2,4,5,6,8,10,12,14,16,21): mod_base = OTHER; note = 2prime-Fluoro nucleosides
  modified_base order(1..3,14..21): mod_base = OTHER; note = Phosphorothioate linkage
  modified_base 1: mod_base = OTHER; note = 5prime-(E)-Vinylphosphonate
ttaatctggtgagccactgta

SEQ ID NO: 26 - RNA, 21 nt, synthetic construct
  source 1..21: mol_type = other RNA
  modified_base order(1,3,7,9,11,13,15,17,18,19,20): mod_base = OTHER; note = 2prime-O-methyl nucleosides
  modified_base order(2,4,5,6,8,10,12,14,16,21): mod_base = OTHER; note = 2prime-Fluoro nucleosides
  modified_base order(1..3,14..21): mod_base = OTHER; note = Phosphorothioate linkage
  modified_base 1: mod_base = OTHER; note = 5prime-(E)-Vinylphosphonate
tgtaatctggtgagccactga

SEQ ID NO: 27 - RNA, 21 nt, synthetic construct
  source 1..21: mol_type = other RNA
  modified_base order(1,3,7,9,11,13,15,17,18,19,20): mod_base = OTHER; note = 2prime-O-methyl nucleosides
  modified_base order(2,4,5,6,8,10,12,14,16,21): mod_base = OTHER; note = 2prime-Fluoro nucleosides
  modified_base order(1..3,14..21): mod_base = OTHER; note = Phosphorothioate linkage
  modified_base 1: mod_base = OTHER; note = 5prime-(E)-Vinylphosphonate
ttgtaatctggtgagccacta

SEQ ID NO: 28 - RNA, 21 nt, synthetic construct
  source 1..21: mol_type = other RNA
  modified_base order(1,3,7,9,11,13,15,17,18,19,20): mod_base = OTHER; note = 2prime-O-methyl nucleosides
  modified_base order(2,4,5,6,8,10,12,14,16,21): mod_base = OTHER; note = 2prime-Fluoro nucleosides
  modified_base order(1..3,14..21): mod_base = OTHER; note = Phosphorothioate linkage
  modified_base 1: mod_base = OTHER; note = 5prime-(E)-Vinylphosphonate
tgtgtaatctggtgagccaca

SEQ ID NO: 29 - RNA, 21 nt, synthetic construct
  source 1..21: mol_type = other RNA
  modified_base order(1,3,7,9,11,13,15,17,18,19,20): mod_base = OTHER; note = 2prime-O-methyl nucleosides
  modified_base order(2,4,5,6,8,10,12,14,16,21): mod_base = OTHER; note = 2prime-Fluoro nucleosides
  modified_base order(1..3,14..21): mod_base = OTHER; note = Phosphorothioate linkage
  modified_base 1: mod_base = OTHER; note = 5prime-(E)-Vinylphosphonate
tagtgtaatctggtgagccaa

SEQ ID NO: 30 - RNA, 21 nt, synthetic construct
  source 1..21: mol_type = other RNA
  modified_base order(1,3,7,9,11,13,15,17,18,19,20): mod_base = OTHER; note = 2prime-O-methyl nucleosides
  modified_base order(2,4,5,6,8,10,12,14,16,21): mod_base = OTHER; note = 2prime-Fluoro nucleosides
  modified_base order(1..3,14..21): mod_base = OTHER; note = Phosphorothioate linkage
  modified_base 1: mod_base = OTHER; note = 5prime-(E)-Vinylphosphonate
tcagtgtaatctggtgagcca

SEQ ID NO: 31 - RNA, 21 nt, synthetic construct
  source 1..21: mol_type = other RNA
  modified_base order(1,3,7,9,11,13,15,17,18,19,20): mod_base = OTHER; note = 2prime-O-methyl nucleosides
  modified_base order(2,4,5,6,8,10,12,14,16,21): mod_base = OTHER; note = 2prime-Fluoro nucleosides
  modified_base order(1..3,14..21): mod_base = OTHER; note = Phosphorothioate linkage
  modified_base 1: mod_base = OTHER; note = 5prime-(E)-Vinylphosphonate
tacagtgtaatctggtgagca

SEQ ID NO: 32 - RNA, 21 nt, synthetic construct
  source 1..21: mol_type = other RNA
  modified_base order(1,3,7,9,11,13,15,17,18,19,20): mod_base = OTHER; note = 2prime-O-methyl nucleosides
  modified_base order(2,4,5,6,8,10,12,14,16,21): mod_base = OTHER; note = 2prime-Fluoro nucleosides
  modified_base order(1..3,14..21): mod_base = OTHER; note = Phosphorothioate linkage
  modified_base 1: mod_base = OTHER; note = 5prime-(E)-Vinylphosphonate
taacagtgtaatctggtgaga

SEQ ID NO: 33 - RNA, 16 nt, synthetic construct
  source 1..16: mol_type = other RNA
  modified_base order(1,2,3,5,7,9,11,12,13,15,16): mod_base = OTHER; note = 2prime-O-methyl nucleosides
  modified_base order(4,6,8,10,14): mod_base = OTHER; note = 2prime-Fluoro nucleosides
  modified_base order(1..3,14..16): mod_base = OTHER; note = Phosphorothioate linkage
acagtggctcaccaga

SEQ ID NO: 34 - RNA, 16 nt, synthetic construct
  source 1..16: mol_type = other RNA
  modified_base order(1,2,3,5,7,9,11,12,13,15,16): mod_base = OTHER; note = 2prime-O-methyl nucleosides
  modified_base order(4,6,8,10,14): mod_base = OTHER; note = 2prime-Fluoro nucleosides
  modified_base order(1..3,14..16): mod_base = OTHER; note = Phosphorothioate linkage
acagtggctcaccaga

SEQ ID NO: 35 - RNA, 16 nt, synthetic construct
  source 1..16: mol_type = other RNA
  modified_base order(1,2,3,5,7,9,11,12,13,15,16): mod_base = OTHER; note = 2prime-O-methyl nucleosides
  modified_base order(4,6,8,10,14): mod_base = OTHER; note = 2prime-Fluoro nucleosides
  modified_base order(1..3,14..16): mod_base = OTHER; note = Phosphorothioate linkage
acagtggctcaccaga

SEQ ID NO: 36 - RNA, 16 nt, synthetic construct
  source 1..16: mol_type = other RNA
  modified_base order(1,2,3,5,7,9,11,12,13,15,16): mod_base = OTHER; note = 2prime-O-methyl nucleosides
  modified_base order(4,6,8,10,14): mod_base = OTHER; note = 2prime-Fluoro nucleosides
  modified_base order(1..3,14..16): mod_base = OTHER; note = Phosphorothioate linkage
acagtggctcaccaga

SEQ ID NO: 37 - RNA, 16 nt, synthetic construct
  source 1..16: mol_type = other RNA
  modified_base order(1,2,3,5,7,9,11,12,13,15,16): mod_base = OTHER; note = 2prime-O-methyl nucleosides
  modified_base order(4,6,8,10,14): mod_base = OTHER; note = 2prime-Fluoro nucleosides
  modified_base order(1..3,14..16): mod_base = OTHER; note = Phosphorothioate linkage
acagtggctcaccaga

SEQ ID NO: 38 - RNA, 16 nt, synthetic construct
  source 1..16: mol_type = other RNA
  modified_base order(1,2,3,5,7,9,11,12,13,15,16): mod_base = OTHER; note = 2prime-O-methyl nucleosides
  modified_base order(4,6,8,10,14): mod_base = OTHER; note = 2prime-Fluoro nucleosides
  modified_base order(1..3,14..16): mod_base = OTHER; note = Phosphorothioate linkage
acagtggctcaccaga

SEQ ID NO: 39 - RNA, 16 nt, synthetic construct
  source 1..16: mol_type = other RNA
  modified_base order(1,2,3,5,7,9,11,12,13,15,16): mod_base = OTHER; note = 2prime-O-methyl nucleosides
  modified_base order(4,6,8,10,14): mod_base = OTHER; note = 2prime-Fluoro nucleosides
  modified_base order(1..3,14..16): mod_base = OTHER; note = Phosphorothioate linkage
acagtggctcaccaga

SEQ ID NO: 40 - RNA, 16 nt, synthetic construct
  source 1..16: mol_type = other RNA
  modified_base order(1,2,3,5,7,9,11,12,13,15,16): mod_base = OTHER; note = 2prime-O-methyl nucleosides
  modified_base order(4,6,8,10,14): mod_base = OTHER; note = 2prime-Fluoro nucleosides
  modified_base order(1..3,14..16): mod_base = OTHER; note = Phosphorothioate linkage
acagtggctcaccaga

SEQ ID NO: 41 - RNA, 16 nt, synthetic construct
  source 1..16: mol_type = other RNA
  modified_base order(1,2,3,5,7,9,11,12,13,15,16): mod_base = OTHER; note = 2prime-O-methyl nucleosides
  modified_base order(4,6,8,10,14): mod_base = OTHER; note = 2prime-Fluoro nucleosides
  modified_base order(1..3,14..16): mod_base = OTHER; note = Phosphorothioate linkage
acagtggctcaccaga

SEQ ID NO: 42 - RNA, 16 nt, synthetic construct
  source 1..16: mol_type = other RNA
  modified_base order(1,2,3,5,7,9,11,12,13,15,16): mod_base = OTHER; note = 2prime-O-methyl nucleosides
  modified_base order(4,6,8,10,14): mod_base = OTHER; note = 2prime-Fluoro nucleosides
  modified_base order(1..3,14..16): mod_base = OTHER; note = Phosphorothioate linkage
acagtggctcaccaga

SEQ ID NO: 43 - RNA, 16 nt, synthetic construct
  source 1..16: mol_type = other RNA
  modified_base order(1,2,3,5,7,9,11,12,13,15,16): mod_base = OTHER; note = 2prime-O-methyl nucleosides
  modified_base order(4,6,8,10,14): mod_base = OTHER; note = 2prime-Fluoro nucleosides
  modified_base order(1..3,14..16): mod_base = OTHER; note = Phosphorothioate linkage
acagtggctcaccaga

SEQ ID NO: 44 - RNA, 16 nt, synthetic construct
  source 1..16: mol_type = other RNA
  modified_base order(1,2,3,5,7,9,11,12,13,15,16): mod_base = OTHER; note = 2prime-O-methyl nucleosides
  modified_base order(4,6,8,10,14): mod_base = OTHER; note = 2prime-Fluoro nucleosides
  modified_base order(1..3,14..16): mod_base = OTHER; note = Phosphorothioate linkage
acagtggctcaccaga

SEQ ID NO: 45 - RNA, 16 nt, synthetic construct
  source 1..16: mol_type = other RNA
  modified_base order(1,2,3,5,7,9,11,12,13,15,16): mod_base = OTHER; note = 2prime-O-methyl nucleosides
  modified_base order(4,6,8,10,14): mod_base = OTHER; note = 2prime-Fluoro nucleosides
  modified_base order(1..3,14..16): mod_base = OTHER; note = Phosphorothioate linkage
acagtggctcaccaga

SEQ ID NO: 46 - RNA, 16 nt, synthetic construct
  source 1..16: mol_type = other RNA
  modified_base order(1,2,3,5,7,9,11,12,13,15,16): mod_base = OTHER; note = 2prime-O-methyl nucleosides
  modified_base order(4,6,8,10,14): mod_base = OTHER; note = 2prime-Fluoro nucleosides
  modified_base order(1..3,14..16): mod_base = OTHER; note = Phosphorothioate linkage
acagtggctcaccaga

SEQ ID NO: 47 - RNA, 16 nt, synthetic construct
  source 1..16: mol_type = other RNA
  modified_base order(1,2,3,5,7,9,11,12,13,15,16): mod_base = OTHER; note = 2prime-O-methyl nucleosides
  modified_base order(4,6,8,10,14): mod_base = OTHER; note = 2prime-Fluoro nucleosides
  modified_base order(1..3,14..16): mod_base = OTHER; note = Phosphorothioate linkage
acagtggctcaccaga

SEQ ID NO: 48 - RNA, 16 nt, synthetic construct
  source 1..16: mol_type = other RNA
  modified_base order(1,2,3,5,7,9,11,12,13,15,16): mod_base = OTHER; note = 2prime-O-methyl nucleosides
  modified_base order(4,6,8,10,14): mod_base = OTHER; note = 2prime-Fluoro nucleosides
  modified_base order(1..3,14..16): mod_base = OTHER; note = Phosphorothioate linkage
agtggctcaccagata

SEQ ID NO: 49 - RNA, 16 nt, synthetic construct
  source 1..16: mol_type = other RNA
  modified_base order(1,2,3,5,7,9,11,12,13,15,16): mod_base = OTHER; note = 2prime-O-methyl nucleosides
  modified_base order(4,6,8,10,14): mod_base = OTHER; note = 2prime-Fluoro nucleosides
  modified_base order(1..3,14..16): mod_base = OTHER; note = Phosphorothioate linkage
agtggctcaccagata

SEQ ID NO: 50 - RNA, 16 nt, synthetic construct
  source 1..16: mol_type = other RNA
  modified_base order(1,2,3,5,7,9,11,12,13,15,16): mod_base = OTHER; note = 2prime-O-methyl nucleosides
  modified_base order(4,6,8,10,14): mod_base = OTHER; note = 2prime-Fluoro nucleosides
  modified_base order(1..3,14..16): mod_base = OTHER; note = Phosphorothioate linkage
agtggctcaccagata

SEQ ID NO: 51 - RNA, 16 nt, synthetic construct
  source 1..16: mol_type = other RNA
  modified_base order(1,2,3,5,7,9,11,12,13,15,16): mod_base = OTHER; note = 2prime-O-methyl nucleosides
  modified_base order(4,6,8,10,14): mod_base = OTHER; note = 2prime-Fluoro nucleosides
  modified_base order(1..3,14..16): mod_base = OTHER; note = Phosphorothioate linkage
agtggctcaccagata

SEQ ID NO: 52 - RNA, 16 nt, synthetic construct
  source 1..16: mol_type = other RNA
  modified_base order(1,2,3,5,7,9,11,12,13,15,16): mod_base = OTHER; note = 2prime-O-methyl nucleosides
  modified_base order(4,6,8,10,14): mod_base = OTHER; note = 2prime-Fluoro nucleosides
  modified_base order(1..3,14..16): mod_base = OTHER; note = Phosphorothioate linkage
agtggctcaccagata

SEQ ID NO: 53 - RNA, 16 nt, synthetic construct
  source 1..16: mol_type = other RNA
  modified_base order(1,2,3,5,7,9,11,12,13,15,16): mod_base = OTHER; note = 2prime-O-methyl nucleosides
  modified_base order(4,6,8,10,14): mod_base = OTHER; note = 2prime-Fluoro nucleosides
  modified_base order(1..3,14..16): mod_base = OTHER; note = Phosphorothioate linkage
agtggctcaccagata

SEQ ID NO: 54 - RNA, 16 nt, synthetic construct
  source 1..16: mol_type = other RNA
  modified_base order(1,2,3,5,7,9,11,12,13,15,16): mod_base = OTHER; note = 2prime-O-methyl nucleosides
  modified_base order(4,6,8,10,14): mod_base = OTHER; note = 2prime-Fluoro nucleosides
  modified_base order(1..3,14..16): mod_base = OTHER; note = Phosphorothioate linkage
agtggctcaccagata

SEQ ID NO: 55 - RNA, 16 nt, synthetic construct
  source 1..16: mol_type = other RNA
  modified_base order(1,2,3,5,7,9,11,12,13,15,16): mod_base = OTHER; note = 2prime-O-methyl nucleosides
  modified_base order(4,6,8,10,14): mod_base = OTHER; note = 2prime-Fluoro nucleosides
  modified_base order(1..3,14..16): mod_base = OTHER; note = Phosphorothioate linkage
agtggctcaccagata

SEQ ID NO: 56 - RNA, 16 nt, synthetic construct
  source 1..16: mol_type = other RNA
  modified_base order(1,2,3,5,7,9,11,12,13,15,16): mod_base = OTHER; note = 2prime-O-methyl nucleosides
  modified_base order(4,6,8,10,14): mod_base = OTHER; note = 2prime-Fluoro nucleosides
  modified_base order(1..3,14..16): mod_base = OTHER; note = Phosphorothioate linkage
agtggctcaccagata

SEQ ID NO: 57 - RNA, 16 nt, synthetic construct
  source 1..16: mol_type = other RNA
  modified_base order(1,2,3,5,7,9,11,12,13,15,16): mod_base = OTHER; note = 2prime-O-methyl nucleosides
  modified_base order(4,6,8,10,14): mod_base = OTHER; note = 2prime-Fluoro nucleosides
  modified_base order(1..3,14..16): mod_base = OTHER; note = Phosphorothioate linkage
agtggctcaccagata

SEQ ID NO: 58 - RNA, 16 nt, synthetic construct
  source 1..16: mol_type = other RNA
  modified_base order(1,2,3,5,7,9,11,12,13,15,16): mod_base = OTHER; note = 2prime-O-methyl nucleosides
  modified_base order(4,6,8,10,14): mod_base = OTHER; note = 2prime-Fluoro nucleosides
  modified_base order(1..3,14..16): mod_base = OTHER; note = Phosphorothioate linkage
agtggctcaccagata

SEQ ID NO: 59 - RNA, 16 nt, synthetic construct
  source 1..16: mol_type = other RNA
  modified_base order(1,2,3,5,7,9,11,12,13,15,16): mod_base = OTHER; note = 2prime-O-methyl nucleosides
  modified_base order(4,6,8,10,14): mod_base = OTHER; note = 2prime-Fluoro nucleosides
  modified_base order(1..3,14..16): mod_base = OTHER; note = Phosphorothioate linkage
agtggctcaccagata

SEQ ID NO: 60 - RNA, 16 nt, synthetic construct
  source 1..16: mol_type = other RNA
  modified_base order(1,2,3,5,7,9,11,12,13,15,16): mod_base = OTHER; note = 2prime-O-methyl nucleosides
  modified_base order(4,6,8,10,14): mod_base = OTHER; note = 2prime-Fluoro nucleosides
  modified_base order(1..3,14..16): mod_base = OTHER; note = Phosphorothioate linkage
agtggctcaccagata

SEQ ID NO: 61 - RNA, 16 nt, synthetic construct
  source 1..16: mol_type = other RNA
  modified_base order(1,2,3,5,7,9,11,12,13,15,16): mod_base = OTHER; note = 2prime-O-methyl nucleosides
  modified_base order(4,6,8,10,14): mod_base = OTHER; note = 2prime-Fluoro nucleosides
  modified_base order(1..3,14..16): mod_base = OTHER; note = Phosphorothioate linkage
agtggctcaccagata

SEQ ID NO: 62 - RNA, 16 nt, synthetic construct
  source 1..16: mol_type = other RNA
  modified_base order(1..3,14..16): mod_base = OTHER; note = Phosphorothioate linkage
agtggctcaccagata

SEQ ID NO: 63 - RNA, 21 nt, synthetic construct
  source 1..21: mol_type = other RNA
  modified_base order(1,3,7,9,11,13,15,17,18,19,20): mod_base = OTHER; note = 2prime-O-methyl nucleosides
  modified_base order(2,4,5,6,8,10,12,14,16,21): mod_base = OTHER; note = 2prime-Fluoro nucleosides
  modified_base order(1..3,14..21): mod_base = OTHER; note = Phosphorothioate linkage
  modified_base 1: mod_base = OTHER; note = 5prime-(E)-Vinylphosphonate
tttggtgagccactgttctta

SEQ ID NO: 64 - RNA, 21 nt, synthetic construct
  source 1..21: mol_type = other RNA
  modified_base order(1,3,7,9,11,13,15,17,18,19,20): mod_base = OTHER; note = 2prime-O-methyl nucleosides
  modified_base order(2,4,5,6,8,10,12,14,16,21): mod_base = OTHER; note = 2prime-Fluoro nucleosides
  modified_base order(1..3,14..21): mod_base = OTHER; note = Phosphorothioate linkage
  modified_base 1: mod_base = OTHER; note = 5prime-(E)-Vinylphosphonate
tcaggtgagccactgttctta

SEQ ID NO: 65 - RNA, 21 nt, synthetic construct
  source 1..21: mol_type = other RNA
  modified_base order(1,3,7,9,11,13,15,17,18,19,20): mod_base = OTHER; note = 2prime-O-methyl nucleosides
  modified_base order(2,4,5,6,8,10,12,14,16,21): mod_base = OTHER; note = 2prime-Fluoro nucleosides
  modified_base order(1..3,14..21): mod_base = OTHER; note = Phosphorothioate linkage
  modified_base 1: mod_base = OTHER; note = 5prime-(E)-Vinylphosphonate
tcttgtgagccactgttctta

SEQ ID NO: 66 - RNA, 21 nt, synthetic construct
  source 1..21: mol_type = other RNA
  modified_base order(1,3,7,9,11,13,15,17,18,19,20): mod_base = OTHER; note = 2prime-O-methyl nucleosides
  modified_base order(2,4,5,6,8,10,12,14,16,21): mod_base = OTHER; note = 2prime-Fluoro nucleosides
  modified_base order(1..3,14..21): mod_base = OTHER; note = Phosphorothioate linkage
  modified_base 1: mod_base = OTHER; note = 5prime-(E)-Vinylphosphonate
tctgttgagccactgttctta

SEQ ID NO: 67 - RNA, 21 nt, synthetic construct
  source 1..21: mol_type = other RNA
  modified_base order(1,3,7,9,11,13,15,17,18,19,20): mod_base = OTHER; note = 2prime-O-methyl nucleosides
  modified_base order(2,4,5,6,8,10,12,14,16,21): mod_base = OTHER; note = 2prime-Fluoro nucleosides
  modified_base order(1..3,14..21): mod_base = OTHER; note = Phosphorothioate linkage
  modified_base 1: mod_base = OTHER; note = 5prime-(E)-Vinylphosphonate
tctggttagccactgttctta

SEQ ID NO: 68 - RNA, 21 nt, synthetic construct
  source 1..21: mol_type = other RNA
  modified_base order(1,3,7,9,11,13,15,17,18,19,20): mod_base = OTHER; note = 2prime-O-methyl nucleosides
  modified_base order(2,4,5,6,8,10,12,14,16,21): mod_base = OTHER; note = 2prime-Fluoro nucleosides
  modified_base order(1..3,14..21): mod_base = OTHER; note = Phosphorothioate linkage
  modified_base 1: mod_base = OTHER; note = 5prime-(E)-Vinylphosphonate
tctggtgtgccactgttctta

SEQ ID NO: 69 - RNA, 21 nt, synthetic construct
  source 1..21: mol_type = other RNA
  modified_base order(1,3,7,9,11,13,15,17,18,19,20): mod_base = OTHER; note = 2prime-O-methyl nucleosides
  modified_base order(2,4,5,6,8,10,12,14,16,21): mod_base = OTHER; note = 2prime-Fluoro nucleosides
  modified_base order(1..3,14..21): mod_base = OTHER; note = Phosphorothioate linkage
  modified_base 1: mod_base = OTHER; note = 5prime-(E)-Vinylphosphonate
tctggtgatccactgttctta

SEQ ID NO: 70 - RNA, 21 nt, synthetic construct
  source 1..21: mol_type = other RNA
  modified_base order(1,3,7,9,11,13,15,17,18,19,20): mod_base = OTHER; note = 2prime-O-methyl nucleosides
  modified_base order(2,4,5,6,8,10,12,14,16,21): mod_base = OTHER; note = 2prime-Fluoro nucleosides
  modified_base order(1..3,14..21): mod_base = OTHER; note = Phosphorothioate linkage
  modified_base 1: mod_base = OTHER; note = 5prime-(E)-Vinylphosphonate
tctggtgagacactgttctta

SEQ ID NO: 71 - RNA, 21 nt, synthetic construct
  source 1..21: mol_type = other RNA
  modified_base order(1,3,7,9,11,13,15,17,18,19,20): mod_base = OTHER; note = 2prime-O-methyl nucleosides
  modified_base order(2,4,5,6,8,10,12,14,16,21): mod_base = OTHER; note = 2prime-Fluoro nucleosides
  modified_base order(1..3,14..21): mod_base = OTHER; note = Phosphorothioate linkage
  modified_base 1: mod_base = OTHER; note = 5prime-(E)-Vinylphosphonate
tctggtgagcaactgttctta

SEQ ID NO: 72 - RNA, 21 nt, synthetic construct
  source 1..21: mol_type = other RNA
  modified_base order(1,3,7,9,11,13,15,17,18,19,20): mod_base = OTHER; note = 2prime-O-methyl nucleosides
  modified_base order(2,4,5,6,8,10,12,14,16,21): mod_base = OTHER; note = 2prime-Fluoro nucleosides
  modified_base order(1..3,14..21): mod_base = OTHER; note = Phosphorothioate linkage
  modified_base 1: mod_base = OTHER; note = 5prime-(E)-Vinylphosphonate
tctggtgagcctctgttctta

SEQ ID NO: 73 - RNA, 21 nt, synthetic construct
  source 1..21: mol_type = other RNA
  modified_base order(1,3,7,9,11,13,15,17,18,19,20): mod_base = OTHER; note = 2prime-O-methyl nucleosides
  modified_base order(2,4,5,6,8,10,12,14,16,21): mod_base = OTHER; note = 2prime-Fluoro nucleosides
  modified_base order(1..3,14..21): mod_base = OTHER; note = Phosphorothioate linkage
  modified_base 1: mod_base = OTHER; note = 5prime-(E)-Vinylphosphonate
tctggtgagccaatgttctta

SEQ ID NO: 74 - RNA, 21 nt, synthetic construct
  source 1..21: mol_type = other RNA
  modified_base order(1,3,7,9,11,13,15,17,18,19,20): mod_base = OTHER; note = 2prime-O-methyl nucleosides
  modified_base order(2,4,5,6,8,10,12,14,16,21): mod_base = OTHER; note = 2prime-Fluoro nucleosides
  modified_base order(1..3,14..21): mod_base = OTHER; note = Phosphorothioate linkage
  modified_base 1: mod_base = OTHER; note = 5prime-(E)-Vinylphosphonate
tctggtgagccacagttctta

SEQ ID NO: 75 - RNA, 21 nt, synthetic construct
  source 1..21: mol_type = other RNA
  modified_base order(1,3,7,9,11,13,15,17,18,19,20): mod_base = OTHER; note = 2prime-O-methyl nucleosides
  modified_base order(2,4,5,6,8,10,12,14,16,21): mod_base = OTHER; note = 2prime-Fluoro nucleosides
  modified_base order(1..3,14..21): mod_base = OTHER; note = Phosphorothioate linkage
  modified_base 1: mod_base = OTHER; note = 5prime-(E)-Vinylphosphonate
tctggtgagccacttttctta

SEQ ID NO: 76 - RNA, 21 nt, synthetic construct
  source 1..21: mol_type = other RNA
  modified_base order(1,3,7,9,11,13,15,17,18,19,20): mod_base = OTHER; note = 2prime-O-methyl nucleosides
  modified_base order(2,4,5,6,8,10,12,14,16,21): mod_base = OTHER; note = 2prime-Fluoro nucleosides
  modified_base order(1..3,14..21): mod_base = OTHER; note = Phosphorothioate linkage
  modified_base 1: mod_base = OTHER; note = 5prime-(E)-Vinylphosphonate
tctggtgagccactgatctta

SEQ ID NO: 77 - RNA, 21 nt, synthetic construct
  source 1..21: mol_type = other RNA
  modified_base order(1,3,7,9,11,13,15,17,18,19,20): mod_base = OTHER; note = 2prime-O-methyl nucleosides
  modified_base order(2,4,5,6,8,10,12,14,16,21): mod_base = OTHER; note = 2prime-Fluoro nucleosides
  modified_base order(1..3,14..21): mod_base = OTHER; note = Phosphorothioate linkage
  modified_base 1: mod_base = OTHER; note = 5prime-(E)-Vinylphosphonate
tctggtgagccactgtactta

SEQ ID NO: 78 - RNA, 21 nt, synthetic construct
  source 1..21: mol_type = other RNA
  modified_base order(1,3,7,9,11,13,15,17,18,19,20): mod_base = OTHER; note = 2prime-O-methyl nucleosides
  modified_base order(2,4,5,6,8,10,12,14,16,21): mod_base = OTHER; note = 2prime-Fluoro nucleosides
  modified_base order(1..3,14..21): mod_base = OTHER; note = Phosphorothioate linkage
  modified_base 1: mod_base = OTHER; note = 5prime-(E)-Vinylphosphonate
tttctggtgagccactgttca

SEQ ID NO: 79 - RNA, 21 nt, synthetic construct
  source 1..21: mol_type = other RNA
  modified_base order(1,3,7,9,11,13,15,17,18,19,20): mod_base = OTHER; note = 2prime-O-methyl nucleosides
  modified_base order(2,4,5,6,8,10,12,14,16,21): mod_base = OTHER; note = 2prime-Fluoro nucleosides
  modified_base order(1..3,14..21): mod_base = OTHER; note = Phosphorothioate linkage
  modified_base 1: mod_base = OTHER; note = 5prime-(E)-Vinylphosphonate
taactggtgagccactgttca

SEQ ID NO: 80 - RNA, 21 nt, synthetic construct
  source 1..21: mol_type = other RNA
  modified_base order(1,3,7,9,11,13,15,17,18,19,20): mod_base = OTHER; note = 2prime-O-methyl nucleosides
  modified_base order(2,4,5,6,8,10,12,14,16,21): mod_base = OTHER; note = 2prime-Fluoro nucleosides
  modified_base order(1..3,14..21): mod_base = OTHER; note = Phosphorothioate linkage
  modified_base 1: mod_base = OTHER; note = 5prime-(E)-Vinylphosphonate
tatatggtgagccactgttca

SEQ ID NO: 81 - RNA, 21 nt, synthetic construct
  source 1..21: mol_type = other RNA
  modified_base order(1,3,7,9,11,13,15,17,18,19,20): mod_base = OTHER; note = 2prime-O-methyl nucleosides
  modified_base order(2,4,5,6,8,10,12,14,16,21): mod_base = OTHER; note = 2prime-Fluoro nucleosides
  modified_base order(1..3,14..21): mod_base = OTHER; note = Phosphorothioate linkage
  modified_base 1: mod_base = OTHER; note = 5prime-(E)-Vinylphosphonate
tatcaggtgagccactgttca

SEQ ID NO: 82 - RNA, 21 nt, synthetic construct
  source 1..21: mol_type = other RNA
  modified_base order(1,3,7,9,11,13,15,17,18,19,20): mod_base = OTHER; note = 2prime-O-methyl nucleosides
  modified_base order(2,4,5,6,8,10,12,14,16,21): mod_base = OTHER; note = 2prime-Fluoro nucleosides
  modified_base order(1..3,14..21): mod_base = OTHER; note = Phosphorothioate linkage
  modified_base 1: mod_base = OTHER; note = 5prime-(E)-Vinylphosphonate
tatcttgtgagccactgttca

SEQ ID NO: 83 - RNA, 21 nt, synthetic construct
  source 1..21: mol_type = other RNA
  modified_base order(1,3,7,9,11,13,15,17,18,19,20): mod_base = OTHER; note = 2prime-O-methyl nucleosides
  modified_base order(2,4,5,6,8,10,12,14,16,21): mod_base = OTHER; note = 2prime-Fluoro nucleosides
  modified_base order(1..3,14..21): mod_base = OTHER; note = Phosphorothioate linkage
  modified_base 1: mod_base = OTHER; note = 5prime-(E)-Vinylphosphonate
tatctgttgagccactgttca

SEQ ID NO: 84 - RNA, 21 nt, synthetic construct
  source 1..21: mol_type = other RNA
  modified_base order(1,3,7,9,11,13,15,17,18,19,20): mod_base = OTHER; note = 2prime-O-methyl nucleosides
  modified_base order(2,4,5,6,8,10,12,14,16,21): mod_base = OTHER; note = 2prime-Fluoro nucleosides
  modified_base order(1..3,14..21): mod_base = OTHER; note = Phosphorothioate linkage
  modified_base 1: mod_base = OTHER; note = 5prime-(E)-Vinylphosphonate
tatctggttagccactgttca

SEQ ID NO: 85 - RNA, 21 nt, synthetic construct
  source 1..21: mol_type = other RNA
  modified_base order(1,3,7,9,11,13,15,17,18,19,20): mod_base = OTHER; note = 2prime-O-methyl nucleosides
  modified_base order(2,4,5,6,8,10,12,14,16,21): mod_base = OTHER; note = 2prime-Fluoro nucleosides
  modified_base order(1..3,14..21): mod_base = OTHER; note = Phosphorothioate linkage
  modified_base 1: mod_base = OTHER; note = 5prime-(E)-Vinylphosphonate
tatctggtgtgccactgttca

SEQ ID NO: 86 - RNA, 21 nt, synthetic construct
  source 1..21: mol_type = other RNA
  modified_base order(1,3,7,9,11,13,15,17,18,19,20): mod_base = OTHER; note = 2prime-O-methyl nucleosides
  modified_base order(2,4,5,6,8,10,12,14,16,21): mod_base = OTHER; note = 2prime-Fluoro nucleosides
  modified_base order(1..3,14..21): mod_base = OTHER; note = Phosphorothioate linkage
  modified_base 1: mod_base = OTHER; note = 5prime-(E)-Vinylphosphonate
tatctggtgatccactgttca

SEQ ID NO: 87 - RNA, 21 nt, synthetic construct
  source 1..21: mol_type = other RNA
  modified_base order(1,3,7,9,11,13,15,17,18,19,20): mod_base = OTHER; note = 2prime-O-methyl nucleosides
  modified_base order(2,4,5,6,8,10,12,14,16,21): mod_base = OTHER; note = 2prime-Fluoro nucleosides
  modified_base order(1..3,14..21): mod_base = OTHER; note = Phosphorothioate linkage
  modified_base 1: mod_base = OTHER; note = 5prime-(E)-Vinylphosphonate
tatctggtgagacactgttca

SEQ ID NO: 88 - RNA, 21 nt, synthetic construct
  source 1..21: mol_type = other RNA
  modified_base order(1,3,7,9,11,13,15,17,18,19,20): mod_base = OTHER; note = 2prime-O-methyl nucleosides
  modified_base order(2,4,5,6,8,10,12,14,16,21): mod_base = OTHER; note = 2prime-Fluoro nucleosides
  modified_base order(1..3,14..21): mod_base = OTHER; note = Phosphorothioate linkage
  modified_base 1: mod_base = OTHER; note = 5prime-(E)-Vinylphosphonate
tatctggtgagcaactgttca

SEQ ID NO: 89 - RNA, 21 nt, synthetic construct
  source 1..21: mol_type = other RNA
  modified_base order(1,3,7,9,11,13,15,17,18,19,20): mod_base = OTHER; note = 2prime-O-methyl nucleosides
  modified_base order(2,4,5,6,8,10,12,14,16,21): mod_base = OTHER; note = 2prime-Fluoro nucleosides
  modified_base order(1..3,14..21): mod_base = OTHER; note = Phosphorothioate linkage
  modified_base 1: mod_base = OTHER; note = 5prime-(E)-Vinylphosphonate
tatctggtgagcctctgttca

SEQ ID NO: 90 - RNA, 21 nt, synthetic construct
  source 1..21: mol_type = other RNA
  modified_base order(1,3,7,9,11,13,15,17,18,19,20): mod_base = OTHER; note = 2prime-O-methyl nucleosides
  modified_base order(2,4,5,6,8,10,12,14,16,21): mod_base = OTHER; note = 2prime-Fluoro nucleosides
  modified_base order(1..3,14..21): mod_base = OTHER; note = Phosphorothioate linkage
  modified_base 1: mod_base = OTHER; note = 5prime-(E)-Vinylphosphonate
tatctggtgagccaatgttca

SEQ ID NO: 91 - RNA, 21 nt, synthetic construct
  source 1..21: mol_type = other RNA
  modified_base order(1,3,7,9,11,13,15,17,18,19,20): mod_base = OTHER; note = 2prime-O-methyl nucleosides
  modified_base order(2,4,5,6,8,10,12,14,16,21): mod_base = OTHER; note = 2prime-Fluoro nucleosides
  modified_base order(1..3,14..21): mod_base = OTHER; note = Phosphorothioate linkage
  modified_base 1: mod_base = OTHER; note = 5prime-(E)-Vinylphosphonate
tatctggtgagccacagttca

SEQ ID NO: 92 - RNA, 21 nt, synthetic construct
  source 1..21: mol_type = other RNA
  modified_base order(1,3,7,9,11,13,15,17,18,19,20): mod_base = OTHER; note = 2prime-O-methyl nucleosides
  modified_base order(2,4,5,6,8,10,12,14,16,21): mod_base = OTHER; note = 2prime-Fluoro nucleosides
  modified_base order(1..3,14..21): mod_base = OTHER; note = Phosphorothioate linkage
  modified_base 1: mod_base = OTHER; note = 5prime-(E)-Vinylphosphonate
tatctggtgagccacttttca

SEQ ID NO: 93 - RNA, 16 nt, synthetic construct
  source 1..16: mol_type = other RNA
  modified_base order(1,2,3,5,7,9,11,12,13,15,16): mod_base = OTHER; note = 2prime-O-methyl nucleosides
  modified_base order(4,6,8,10,14): mod_base = OTHER; note = 2prime-Fluoro nucleosides
  modified_base order(1..3,14..16): mod_base = OTHER; note = Phosphorothioate linkage
ctatgtcaatggttta

SEQ ID NO: 94 - RNA, 16 nt, synthetic construct
  source 1..16: mol_type = other RNA
  modified_base order(1,2,3,5,7,9,11,12,13,15,16): mod_base = OTHER; note = 2prime-O-methyl nucleosides
  modified_base order(4,6,8,10,14): mod_base = OTHER; note = 2prime-Fluoro nucleosides
  modified_base order(1..3,14..16): mod_base = OTHER; note = Phosphorothioate linkage
ccatgttcaactttaa

SEQ ID NO: 95 - RNA, 16 nt, synthetic construct
  source 1..16: mol_type = other RNA
  modified_base order(1,2,3,5,7,9,11,12,13,15,16): mod_base = OTHER; note = 2prime-O-methyl nucleosides
  modified_base order(4,6,8,10,14): mod_base = OTHER; note = 2prime-Fluoro nucleosides
  modified_base order(1..3,14..16): mod_base = OTHER; note = Phosphorothioate linkage
atattatcatattcaa

SEQ ID NO: 96 - RNA, 16 nt, synthetic construct
  source 1..16: mol_type = other RNA
  modified_base order(1,2,3,5,7,9,11,12,13,15,16): mod_base = OTHER; note = 2prime-O-methyl nucleosides
  modified_base order(4,6,8,10,14): mod_base = OTHER; note = 2prime-Fluoro nucleosides
  modified_base order(1..3,14..16): mod_base = OTHER; note = Phosphorothioate linkage
attgggaacaattaca

SEQ ID NO: 97 - RNA, 16 nt, synthetic construct
  source 1..16: mol_type = other RNA
  modified_base order(1,2,3,5,7,9,11,12,13,15,16): mod_base = OTHER; note = 2prime-O-methyl nucleosides
  modified_base order(4,6,8,10,14): mod_base = OTHER; note = 2prime-Fluoro nucleosides
  modified_base order(1..3,14..16): mod_base = OTHER; note = Phosphorothioate linkage
ccctatgtcaatttga

SEQ ID NO: 98 - RNA, 16 nt, synthetic construct
  source 1..16: mol_type = other RNA
  modified_base order(1,2,3,5,7,9,11,12,13,15,16): mod_base = OTHER; note = 2prime-O-methyl nucleosides
  modified_base order(4,6,8,10,14): mod_base = OTHER; note = 2prime-Fluoro nucleosides
  modified_base order(1..3,14..16): mod_base = OTHER; note = Phosphorothioate linkage
ggatccaaacatttca

SEQ ID NO: 99 - RNA, 16 nt, synthetic construct
  source 1..16: mol_type = other RNA
  modified_base order(1,2,3,5,7,9,11,12,13,15,16): mod_base = OTHER; note = 2prime-O-methyl nucleosides
  modified_base order(4,6,8,10,14): mod_base = OTHER; note = 2prime-Fluoro nucleosides
  modified_base order(1..3,14..16): mod_base = OTHER; note = Phosphorothioate linkage
agataacagtttgata

SEQ ID NO: 100 - RNA, 16 nt, synthetic construct
  source 1..16: mol_type = other RNA
  modified_base order(1,2,3,5,7,9,11,12,13,15,16): mod_base = OTHER; note = 2prime-O-methyl nucleosides
  modified_base order(4,6,8,10,14): mod_base = OTHER; note = 2prime-Fluoro nucleosides
  modified_base order(1..3,14..16): mod_base = OTHER; note = Phosphorothioate linkage
ccatattatcatatta

SEQ ID NO: 101 - RNA, 16 nt, synthetic construct
  source 1..16: mol_type = other RNA
  modified_base order(1,2,3,5,7,9,11,12,13,15,16): mod_base = OTHER; note = 2prime-O-methyl nucleosides
  modified_base order(4,6,8,10,14): mod_base = OTHER; note = 2prime-Fluoro nucleosides
  modified_base order(1..3,14..16): mod_base = OTHER; note = Phosphorothioate linkage
gattcttagtagtata

SEQ ID NO: 102 - RNA, 16 nt, synthetic construct
  source 1..16: mol_type = other RNA
  modified_base order(1,2,3,5,7,9,11,12,13,15,16): mod_base = OTHER; note = 2prime-O-methyl nucleosides
  modified_base order(4,6,8,10,14): mod_base = OTHER; note = 2prime-Fluoro nucleosides
  modified_base order(1..3,14..16): mod_base = OTHER; note = Phosphorothioate linkage
cctatgtcaatttgta

SEQ ID NO: 103 - RNA, 16 nt, synthetic construct
  source 1..16: mol_type = other RNA
  modified_base order(1,2,3,5,7,9,11,12,13,15,16): mod_base = OTHER; note = 2prime-O-methyl nucleosides
  modified_base order(4,6,8,10,14): mod_base = OTHER; note = 2prime-Fluoro nucleosides
  modified_base order(1..3,14..16): mod_base = OTHER; note = Phosphorothioate linkage
ttatcaaacacccaca

SEQ ID NO: 104 - RNA, 16 nt, synthetic construct
  source 1..16: mol_type = other RNA
  modified_base order(1,2,3,5,7,9,11,12,13,15,16): mod_base = OTHER; note = 2prime-O-methyl nucleosides
  modified_base order(4,6,8,10,14): mod_base = OTHER; note = 2prime-Fluoro nucleosides
  modified_base order(1..3,14..16): mod_base = OTHER; note = Phosphorothioate linkage
acaattacattaatta

SEQ ID NO: 105 - RNA, 16 nt, synthetic construct
  source 1..16: mol_type = other RNA
  modified_base order(1,2,3,5,7,9,11,12,13,15,16): mod_base = OTHER; note = 2prime-O-methyl nucleosides
  modified_base order(4,6,8,10,14): mod_base = OTHER; note = 2prime-Fluoro nucleosides
  modified_base order(1..3,14..16): mod_base = OTHER; note = Phosphorothioate linkage
ataattgggaacaata

SEQ ID NO: 106 - RNA, 16 nt, synthetic construct
  source 1..16: mol_type = other RNA
  modified_base order(1,2,3,5,7,9,11,12,13,15,16): mod_base = OTHER; note = 2prime-O-methyl nucleosides
  modified_base order(4,6,8,10,14): mod_base = OTHER; note = 2prime-Fluoro nucleosides
  modified_base order(1..3,14..16): mod_base = OTHER; note = Phosphorothioate linkage
gtagaacaaatactta

SEQ ID NO: 107 - RNA, 16 nt, synthetic construct
  source 1..16: mol_type = other RNA
  modified_base order(1,2,3,5,7,9,11,12,13,15,16): mod_base = OTHER; note = 2prime-O-methyl nucleosides
  modified_base order(4,6,8,10,14): mod_base = OTHER; note = 2prime-Fluoro nucleosides
  modified_base order(1..3,14..16): mod_base = OTHER; note = Phosphorothioate linkage
cagaagttatttatta

SEQ ID NO: 108 - RNA, 16 nt, synthetic construct
  source 1..16: mol_type = other RNA
  modified_base order(1,2,3,5,7,9,11,12,13,15,16): mod_base = OTHER; note = 2prime-O-methyl nucleosides
  modified_base order(4,6,8,10,14): mod_base = OTHER; note = 2prime-Fluoro nucleosides
  modified_base order(1..3,14..16): mod_base = OTHER; note = Phosphorothioate linkage
gcacttcaggctgtca

SEQ ID NO: 109 - RNA, 16 nt, synthetic construct
  source 1..16: mol_type = other RNA
  modified_base order(1,2,3,5,7,9,11,12,13,15,16): mod_base = OTHER; note = 2prime-O-methyl nucleosides
  modified_base order(4,6,8,10,14): mod_base = OTHER; note = 2prime-Fluoro nucleosides
  modified_base order(1..3,14..16): mod_base = OTHER; note = Phosphorothioate linkage
acatatgggattctta

SEQ ID NO: 110 - RNA, 16 nt, synthetic construct
  source 1..16: mol_type = other RNA
  modified_base order(1,2,3,5,7,9,11,12,13,15,16): mod_base = OTHER; note = 2prime-O-methyl nucleosides
  modified_base order(4,6,8,10,14): mod_base = OTHER; note = 2prime-Fluoro nucleosides
  modified_base order(1..3,14..16): mod_base = OTHER; note = Phosphorothioate linkage
caacctaataggttta

SEQ ID NO: 111 - RNA, 16 nt, synthetic construct
  source 1..16: mol_type = other RNA
  modified_base order(1,2,3,5,7,9,11,12,13,15,16): mod_base = OTHER; note = 2prime-O-methyl nucleosides
  modified_base order(4,6,8,10,14): mod_base = OTHER; note = 2prime-Fluoro nucleosides
  modified_base order(1..3,14..16): mod_base = OTHER; note = Phosphorothioate linkage
acatgtctcagctata

SEQ ID NO: 112 - RNA, 16 nt, synthetic construct
  source 1..16: mol_type = other RNA
  modified_base order(1,2,3,5,7,9,11,12,13,15,16): mod_base = OTHER; note = 2prime-O-methyl nucleosides
  modified_base order(4,6,8,10,14): mod_base = OTHER; note = 2prime-Fluoro nucleosides
  modified_base order(1..3,14..16): mod_base = OTHER; note = Phosphorothioate linkage
gaaagaatgaaagata

SEQ ID NO: 113 - RNA, 16 nt, synthetic construct
  source 1..16: mol_type = other RNA
  modified_base order(1,2,3,5,7,9,11,12,13,15,16): mod_base = OTHER; note = 2prime-O-methyl nucleosides
  modified_base order(4,6,8,10,14): mod_base = OTHER; note = 2prime-Fluoro nucleosides
  modified_base order(1..3,14..16): mod_base = OTHER; note = Phosphorothioate linkage
gcagaaatgaatgaaa

SEQ ID NO: 114 - RNA, 16 nt, synthetic construct
  source 1..16: mol_type = other RNA
  modified_base order(1,2,3,5,7,9,11,12,13,15,16): mod_base = OTHER; note = 2prime-O-methyl nucleosides
  modified_base order(4,6,8,10,14): mod_base = OTHER; note = 2prime-Fluoro nucleosides
  modified_base order(1..3,14..16): mod_base = OTHER; note = Phosphorothioate linkage
ccatgtccatgttgta

SEQ ID NO: 115 - RNA, 16 nt, synthetic construct
  source 1..16: mol_type = other RNA
  modified_base order(1,2,3,5,7,9,11,12,13,15,16): mod_base = OTHER; note = 2prime-O-methyl nucleosides
  modified_base order(4,6,8,10,14): mod_base = OTHER; note = 2prime-Fluoro nucleosides
  modified_base order(1..3,14..16): mod_base = OTHER; note = Phosphorothioate linkage
atagtaacatgtatta

SEQ ID NO: 116 - RNA, 16 nt, synthetic construct
  source 1..16: mol_type = other RNA
  modified_base order(1,2,3,5,7,9,11,12,13,15,16): mod_base = OTHER; note = 2prime-O-methyl nucleosides
  modified_base order(4,6,8,10,14): mod_base = OTHER; note = 2prime-Fluoro nucleosides
  modified_base order(1..3,14..16): mod_base = OTHER; note = Phosphorothioate linkage
ctttgaaatagaagta

SEQ ID NO: 117 - RNA, 16 nt, synthetic construct
  source 1..16: mol_type = other RNA
  modified_base order(1,2,3,5,7,9,11,12,13,15,16): mod_base = OTHER; note = 2prime-O-methyl nucleosides
  modified_base order(4,6,8,10,14): mod_base = OTHER; note = 2prime-Fluoro nucleosides
  modified_base order(1..3,14..16): mod_base = OTHER; note = Phosphorothioate linkage
aagagataacagttta

SEQ ID NO: 118 - RNA, 16 nt, synthetic construct
  source 1..16: mol_type = other RNA
  modified_base order(1,2,3,5,7,9,11,12,13,15,16): mod_base = OTHER; note = 2prime-O-methyl nucleosides
  modified_base order(4,6,8,10,14): mod_base = OTHER; note = 2prime-Fluoro nucleosides
  modified_base order(1..3,14..16): mod_base = OTHER; note = Phosphorothioate linkage
caatgggttgatatta

SEQ ID NO: 119 - RNA, 16 nt, synthetic construct
  source 1..16: mol_type = other RNA
  modified_base order(1,2,3,5,7,9,11,12,13,15,16): mod_base = OTHER; note = 2prime-O-methyl nucleosides
  modified_base order(4,6,8,10,14): mod_base = OTHER; note = 2prime-Fluoro nucleosides
  modified_base order(1..3,14..16): mod_base = OTHER; note = Phosphorothioate linkage
tagttgtacactgtta

SEQ ID NO: 120 - RNA, 16 nt, synthetic construct
  source 1..16: mol_type = other RNA
  modified_base order(1,2,3,5,7,9,11,12,13,15,16): mod_base = OTHER; note = 2prime-O-methyl nucleosides
  modified_base order(4,6,8,10,14): mod_base = OTHER; note = 2prime-Fluoro nucleosides
  modified_base order(1..3,14..16): mod_base = OTHER; note = Phosphorothioate linkage
ttatagcagaagttaa

SEQ ID NO: 121 - RNA, 16 nt, synthetic construct
  source 1..16: mol_type = other RNA
  modified_base order(1,2,3,5,7,9,11,12,13,15,16): mod_base = OTHER; note = 2prime-O-methyl nucleosides
  modified_base order(4,6,8,10,14): mod_base = OTHER; note = 2prime-Fluoro nucleosides
  modified_base order(1..3,14..16): mod_base = OTHER; note = Phosphorothioate linkage
gcaagagtagatggca

SEQ ID NO: 122 - RNA, 16 nt, synthetic construct
  source 1..16: mol_type = other RNA
  modified_base order(1,2,3,5,7,9,11,12,13,15,16): mod_base = OTHER; note = 2prime-O-methyl nucleosides
  modified_base order(4,6,8,10,14): mod_base = OTHER; note = 2prime-Fluoro nucleosides
  modified_base order(1..3,14..16): mod_base = OTHER; note = Phosphorothioate linkage
gcatatgcatatctga

SEQ ID NO: 123 - RNA, 16 nt, synthetic construct
  source 1..16: mol_type = other RNA
  modified_base order(1,2,3,5,7,9,11,12,13,15,16): mod_base = OTHER; note = 2prime-O-methyl nucleosides
  modified_base order(4,6,8,10,14): mod_base = OTHER; note = 2prime-Fluoro nucleosides
  modified_base order(1..3,14..16): mod_base = OTHER; note = Phosphorothioate linkage
taatctgaagcctgta

SEQ ID NO: 124 - RNA, 16 nt, synthetic construct
  source 1..16: mol_type = other RNA
  modified_base order(1,2,3,5,7,9,11,12,13,15,16): mod_base = OTHER; note = 2prime-O-methyl nucleosides
  modified_base order(4,6,8,10,14): mod_base = OTHER; note = 2prime-Fluoro nucleosides
  modified_base order(1..3,14..16): mod_base = OTHER; note = Phosphorothioate linkage
aggtttctgagttaaa

SEQ ID NO: 125 - RNA, 16 nt, synthetic construct
  source 1..16: mol_type = other RNA
  modified_base order(1,2,3,5,7,9,11,12,13,15,16): mod_base = OTHER; note = 2prime-O-methyl nucleosides
  modified_base order(4,6,8,10,14): mod_base = OTHER; note = 2prime-Fluoro nucleosides
  modified_base order(1..3,14..16): mod_base = OTHER; note = Phosphorothioate linkage
gatccaaacatttcta

SEQ ID NO: 126 - RNA, 16 nt, synthetic construct
  source 1..16: mol_type = other RNA
  modified_base order(1,2,3,5,7,9,11,12,13,15,16): mod_base = OTHER; note = 2prime-O-methyl nucleosides
  modified_base order(4,6,8,10,14): mod_base = OTHER; note = 2prime-Fluoro nucleosides
  modified_base order(1..3,14..16): mod_base = OTHER; note = Phosphorothioate linkage
gcagagaaatgtaata

SEQ ID NO: 127 - RNA, 16 nt, synthetic construct
  source 1..16: mol_type = other RNA
  modified_base order(1,2,3,5,7,9,11,12,13,15,16): mod_base = OTHER; note = 2prime-O-methyl nucleosides
  modified_base order(4,6,8,10,14): mod_base = OTHER; note = 2prime-Fluoro nucleosides
  modified_base order(1..3,14..16): mod_base = OTHER; note = Phosphorothioate linkage
tattggaagtaatcta

SEQ ID NO: 128 - RNA, 16 nt, synthetic construct
  source 1..16: mol_type = other RNA
  modified_base order(1,2,3,5,7,9,11,12,13,15,16): mod_base = OTHER; note = 2prime-O-methyl nucleosides
  modified_base order(4,6,8,10,14): mod_base = OTHER; note = 2prime-Fluoro nucleosides
  modified_base order(1..3,14..16): mod_base = OTHER; note = Phosphorothioate linkage
atatgcatatctgtaa

SEQ ID NO: 129 - RNA, 16 nt, synthetic construct
  source 1..16: mol_type = other RNA
  modified_base order(1,2,3,5,7,9,11,12,13,15,16): mod_base = OTHER; note = 2prime-O-methyl nucleosides
  modified_base order(4,6,8,10,14): mod_base = OTHER; note = 2prime-Fluoro nucleosides
  modified_base order(1..3,14..16): mod_base = OTHER; note = Phosphorothioate linkage
attggaagtaatctga

SEQ ID NO: 130 - RNA, 16 nt, synthetic construct
  source 1..16: mol_type = other RNA
  modified_base order(1,2,3,5,7,9,11,12,13,15,16): mod_base = OTHER; note = 2prime-O-methyl nucleosides
  modified_base order(4,6,8,10,14): mod_base = OTHER; note = 2prime-Fluoro nucleosides
  modified_base order(1..3,14..16): mod_base = OTHER; note = Phosphorothioate linkage
ggcaaatacacttaca

SEQ ID NO: 131 - RNA, 16 nt, synthetic construct
  source 1..16: mol_type = other RNA
  modified_base order(1,2,3,5,7,9,11,12,13,15,16): mod_base = OTHER; note = 2prime-O-methyl nucleosides
  modified_base order(4,6,8,10,14): mod_base = OTHER; note = 2prime-Fluoro nucleosides
  modified_base order(1..3,14..16): mod_base = OTHER; note = Phosphorothioate linkage
caatcttagaagctca

SEQ ID NO: 132 - RNA, 16 nt, synthetic construct
  source 1..16: mol_type = other RNA
  modified_base order(1,2,3,5,7,9,11,12,13,15,16): mod_base = OTHER; note = 2prime-O-methyl nucleosides
  modified_base order(4,6,8,10,14): mod_base = OTHER; note = 2prime-Fluoro nucleosides
  modified_base order(1..3,14..16): mod_base = OTHER; note = Phosphorothioate linkage
actatgtcaatggtta

SEQ ID NO: 133 - RNA, 16 nt, synthetic construct
  source 1..16: mol_type = other RNA
  modified_base order(1,2,3,5,7,9,11,12,13,15,16): mod_base = OTHER; note = 2prime-O-methyl nucleosides
  modified_base order(4,6,8,10,14): mod_base = OTHER; note = 2prime-Fluoro nucleosides
  modified_base order(1..3,14..16): mod_base = OTHER; note = Phosphorothioate linkage
tttcttaatatttata

SEQ ID NO: 134 - RNA, 16 nt, synthetic construct
  source 1..16: mol_type = other RNA
  modified_base order(1,2,3,5,7,9,11,12,13,15,16): mod_base = OTHER; note = 2prime-O-methyl nucleosides
  modified_base order(4,6,8,10,14): mod_base = OTHER; note = 2prime-Fluoro nucleosides
  modified_base order(1..3,14..16): mod_base = OTHER; note = Phosphorothioate linkage
ccaatttcatatttaa

SEQ ID NO: 135 - RNA, 16 nt, synthetic construct
  source 1..16: mol_type = other RNA
  modified_base order(1,2,3,5,7,9,11,12,13,15,16): mod_base = OTHER; note = 2prime-O-methyl nucleosides
  modified_base order(4,6,8,10,14): mod_base = OTHER; note = 2prime-Fluoro nucleosides
  modified_base order(1..3,14..16): mod_base = OTHER; note = Phosphorothioate linkage
ccaatgtctgtttgga

SEQ ID NO: 136 - RNA, 16 nt, synthetic construct
  source 1..16: mol_type = other RNA
  modified_base order(1,2,3,5,7,9,11,12,13,15,16): mod_base = OTHER; note = 2prime-O-methyl nucleosides
  modified_base order(4,6,8,10,14): mod_base = OTHER; note = 2prime-Fluoro nucleosides
  modified_base order(1..3,14..16): mod_base = OTHER; note = Phosphorothioate linkage
ttaaatcagaagctta

SEQ ID NO: 137 - RNA, 16 nt, synthetic construct
  source 1..16: mol_type = other RNA
  modified_base order(1,2,3,5,7,9,11,12,13,15,16): mod_base = OTHER; note = 2prime-O-methyl nucleosides
  modified_base order(4,6,8,10,14): mod_base = OTHER; note = 2prime-Fluoro nucleosides
  modified_base order(1..3,14..16): mod_base = OTHER; note = Phosphorothioate linkage
tcactgagaagctgta

SEQ ID NO: 138 - RNA, 16 nt, synthetic construct
  source 1..16: mol_type = other RNA
  modified_base order(1,2,3,5,7,9,11,12,13,15,16): mod_base = OTHER; note = 2prime-O-methyl nucleosides
  modified_base order(4,6,8,10,14): mod_base = OTHER; note = 2prime-Fluoro nucleosides
  modified_base order(1..3,14..16): mod_base = OTHER; note = Phosphorothioate linkage
gaaggataggctataa

SEQ ID NO: 139 - RNA, 16 nt, synthetic construct
  source 1..16: mol_type = other RNA
  modified_base order(1,2,3,5,7,9,11,12,13,15,16): mod_base = OTHER; note = 2prime-O-methyl nucleosides
  modified_base order(4,6,8,10,14): mod_base = OTHER; note = 2prime-Fluoro nucleosides
  modified_base order(1..3,14..16): mod_base = OTHER; note = Phosphorothioate linkage
ccaagttacatttcga

SEQ ID NO: 140 - RNA, 16 nt, synthetic construct
  source 1..16: mol_type = other RNA
  modified_base order(1,2,3,5,7,9,11,12,13,15,16): mod_base = OTHER; note = 2prime-O-methyl nucleosides
  modified_base order(4,6,8,10,14): mod_base = OTHER; note = 2prime-Fluoro nucleosides
  modified_base order(1..3,14..16): mod_base = OTHER; note = Phosphorothioate linkage
gcagaagttatttata

SEQ ID NO: 141 - RNA, 16 nt, synthetic construct
  source 1..16: mol_type = other RNA
  modified_base order(1,2,3,5,7,9,11,12,13,15,16): mod_base = OTHER; note = 2prime-O-methyl nucleosides
  modified_base order(4,6,8,10,14): mod_base = OTHER; note = 2prime-Fluoro nucleosides
  modified_base order(1..3,14..16): mod_base = OTHER; note = Phosphorothioate linkage
ctatgtcaatggttta

SEQ ID NO: 142 - RNA, 16 nt, synthetic construct
  source 1..16: mol_type = other RNA
  modified_base order(1,2,3,5,7,9,11,12,13,15,16): mod_base = OTHER; note = 2prime-O-methyl nucleosides
  modified_base order(4,6,8,10,14): mod_base = OTHER; note = 2prime-Fluoro nucleosides
  modified_base order(1..3,14..16): mod_base = OTHER; note = Phosphorothioate linkage
acaatattagatatta

SEQ ID NO: 143 - RNA, 16 nt, synthetic construct
  source 1..16: mol_type = other RNA
  modified_base order(1,2,3,5,7,9,11,12,13,15,16): mod_base = OTHER; note = 2prime-O-methyl nucleosides
  modified_base order(4,6,8,10,14): mod_base = OTHER; note = 2prime-Fluoro nucleosides
  modified_base order(1..3,14..16): mod_base = OTHER; note = Phosphorothioate linkage
gattcaaacatttcta

SEQ ID NO: 144 - RNA, 16 nt, synthetic construct
  source 1..16: mol_type = other RNA
  modified_base order(1,2,3,5,7,9,11,12,13,15,16): mod_base = OTHER; note = 2prime-O-methyl nucleosides
  modified_base order(4,6,8,10,14): mod_base = OTHER; note = 2prime-Fluoro nucleosides
  modified_base order(1..3,14..16): mod_base = OTHER; note = Phosphorothioate linkage
ggattcaaacatttca

SEQ ID NO: 145 - RNA, 16 nt, synthetic construct
  source 1..16: mol_type = other RNA
  modified_base order(1,2,3,5,7,9,11,12,13,15,16): mod_base = OTHER; note = 2prime-O-methyl nucleosides
  modified_base order(4,6,8,10,14): mod_base = OTHER; note = 2prime-Fluoro nucleosides
  modified_base order(1..3,14..16): mod_base = OTHER; note = Phosphorothioate linkage
tcagttattcatttaa

SEQ ID NO: 146 - RNA, 16 nt, synthetic construct
  source 1..16: mol_type = other RNA
  modified_base order(1,2,3,5,7,9,11,12,13,15,16): mod_base = OTHER; note = 2prime-O-methyl nucleosides
  modified_base order(4,6,8,10,14): mod_base = OTHER; note = 2prime-Fluoro nucleosides
  modified_base order(1..3,14..16): mod_base = OTHER; note = Phosphorothioate linkage
atagaatttaaattga

SEQ ID NO: 147 - RNA, 16 nt, synthetic construct
  source 1..16: mol_type = other RNA
  modified_base order(1,2,3,5,7,9,11,12,13,15,16): mod_base = OTHER; note = 2prime-O-methyl nucleosides
  modified_base order(4,6,8,10,14): mod_base = OTHER; note = 2prime-Fluoro nucleosides
  modified_base order(1..3,14..16): mod_base = OTHER; note = Phosphorothioate linkage
ataattataattatta

SEQ ID NO: 148 - RNA, 16 nt, synthetic construct
  source 1..16: mol_type = other RNA
  modified_base order(1,2,3,5,7,9,11,12,13,15,16): mod_base = OTHER; note = 2prime-O-methyl nucleosides
  modified_base order(4,6,8,10,14): mod_base = OTHER; note = 2prime-Fluoro nucleosides
  modified_base order(1..3,14..16): mod_base = OTHER; note = Phosphorothioate linkage
caacctaataggttta

SEQ ID NO: 149 - RNA, 16 nt, synthetic construct
  source 1..16: mol_type = other RNA
  modified_base order(1,2,3,5,7,9,11,12,13,15,16): mod_base = OTHER; note = 2prime-O-methyl nucleosides
  modified_base order(4,6,8,10,14): mod_base = OTHER; note = 2prime-Fluoro nucleosides
  modified_base order(1..3,14..16): mod_base = OTHER; note = Phosphorothioate linkage
gcacttcaggctgtca

SEQ ID NO: 150 - RNA, 16 nt, synthetic construct
  source 1..16: mol_type = other RNA
  modified_base order(1,2,3,5,7,9,11,12,13,15,16): mod_base = OTHER; note = 2prime-O-methyl nucleosides
  modified_base order(4,6,8,10,14): mod_base = OTHER; note = 2prime-Fluoro nucleosides
  modified_base order(1..3,14..16): mod_base = OTHER; note = Phosphorothioate linkage
ccctctgaactgttta

SEQ ID NO: 151 - RNA, 16 nt, synthetic construct
  source 1..16: mol_type = other RNA
  modified_base order(1,2,3,5,7,9,11,12,13,15,16): mod_base = OTHER; note = 2prime-O-methyl nucleosides
  modified_base order(4,6,8,10,14): mod_base = OTHER; note = 2prime-Fluoro nucleosides
  modified_base order(1..3,14..16): mod_base = OTHER; note = Phosphorothioate linkage
caatattagatattga

SEQ ID NO: 152 - RNA, 16 nt, synthetic construct
  source 1..16: mol_type = other RNA
  modified_base order(1,2,3,5,7,9,11,12,13,15,16): mod_base = OTHER; note = 2prime-O-methyl nucleosides
  modified_base order(4,6,8,10,14): mod_base = OTHER; note = 2prime-Fluoro nucleosides
  modified_base order(1..3,14..16): mod_base = OTHER; note = Phosphorothioate linkage
agagataacggttgga

SEQ ID NO: 153 - RNA, 16 nt, synthetic construct
  source 1..16: mol_type = other RNA
  modified_base order(1,2,3,5,7,9,11,12,13,15,16): mod_base = OTHER; note = 2prime-O-methyl nucleosides
  modified_base order(4,6,8,10,14): mod_base = OTHER; note = 2prime-Fluoro nucleosides
  modified_base order(1..3,14..16): mod_base = OTHER; note = Phosphorothioate linkage
gcattaagtcagtcca

SEQ ID NO: 154 - RNA, 16 nt, synthetic construct
  source 1..16: mol_type = other RNA
  modified_base order(1,2,3,5,7,9,11,12,13,15,16): mod_base = OTHER; note = 2prime-O-methyl nucleosides
  modified_base order(4,6,8,10,14): mod_base = OTHER; note = 2prime-Fluoro nucleosides
  modified_base order(1..3,14..16): mod_base = OTHER; note = Phosphorothioate linkage
ttattcatttacataa

SEQ ID NO: 155 - RNA, 16 nt, synthetic construct
  source 1..16: mol_type = other RNA
  modified_base order(1,2,3,5,7,9,11,12,13,15,16): mod_base = OTHER; note = 2prime-O-methyl nucleosides
  modified_base order(4,6,8,10,14): mod_base = OTHER; note = 2prime-Fluoro nucleosides
  modified_base order(1..3,14..16): mod_base = OTHER; note = Phosphorothioate linkage
atagattaaagtcata

SEQ ID NO: 156 - RNA, 16 nt, synthetic construct
  source 1..16: mol_type = other RNA
  modified_base order(1,2,3,5,7,9,11,12,13,15,16): mod_base = OTHER; note = 2prime-O-methyl nucleosides
  modified_base order(4,6,8,10,14): mod_base = OTHER; note = 2prime-Fluoro nucleosides
  modified_base order(1..3,14..16): mod_base = OTHER; note = Phosphorothioate linkage
aagtgaatcatttcta

SEQ ID NO: 157 - RNA, 16 nt, synthetic construct
  source 1..16: mol_type = other RNA
  modified_base order(1,2,3,5,7,9,11,12,13,15,16): mod_base = OTHER; note = 2prime-O-methyl nucleosides
  modified_base order(4,6,8,10,14): mod_base = OTHER; note = 2prime-Fluoro nucleosides
  modified_base order(1..3,14..16): mod_base = OTHER; note = Phosphorothioate linkage
ttgcaatagaatttaa

SEQ ID NO: 158 - RNA, 16 nt, synthetic construct
  source 1..16: mol_type = other RNA
  modified_base order(1,2,3,5,7,9,11,12,13,15,16): mod_base = OTHER; note = 2prime-O-methyl nucleosides
  modified_base order(4,6,8,10,14): mod_base = OTHER; note = 2prime-Fluoro nucleosides
  modified_base order(1..3,14..16): mod_base = OTHER; note = Phosphorothioate linkage
gttgtacaaatctcta

SEQ ID NO: 159 - RNA, 16 nt, synthetic construct
  source 1..16: mol_type = other RNA
  modified_base order(1,2,3,5,7,9,11,12,13,15,16): mod_base = OTHER; note = 2prime-O-methyl nucleosides
  modified_base order(4,6,8,10,14): mod_base = OTHER; note = 2prime-Fluoro nucleosides
  modified_base order(1..3,14..16): mod_base = OTHER; note = Phosphorothioate linkage
acaatggttgatatta

SEQ ID NO: 160 - RNA, 16 nt, synthetic construct
  source 1..16: mol_type = other RNA
  modified_base order(1,2,3,5,7,9,11,12,13,15,16): mod_base = OTHER; note = 2prime-O-methyl nucleosides
  modified_base order(4,6,8,10,14): mod_base = OTHER; note = 2prime-Fluoro nucleosides
  modified_base order(1..3,14..16): mod_base = OTHER; note = Phosphorothioate linkage
gcagaagttatttata

SEQ ID NO: 161 - RNA, 16 nt, synthetic construct
  source 1..16: mol_type = other RNA
  modified_base order(1,2,3,5,7,9,11,12,13,15,16): mod_base = OTHER; note = 2prime-O-methyl nucleosides
  modified_base order(4,6,8,10,14): mod_base = OTHER; note = 2prime-Fluoro nucleosides
  modified_base order(1..3,14..16): mod_base = OTHER; note = Phosphorothioate linkage
tcaatataccttatca

SEQ ID NO: 162 - RNA, 16 nt, synthetic construct
  source 1..16: mol_type = other RNA
  modified_base order(1,2,3,5,7,9,11,12,13,15,16): mod_base = OTHER; note = 2prime-O-methyl nucleosides
  modified_base order(4,6,8,10,14): mod_base = OTHER; note = 2prime-Fluoro nucleosides
  modified_base order(1..3,14..16): mod_base = OTHER; note = Phosphorothioate linkage
acttgtttgaagttta

SEQ ID NO: 163 - RNA, 16 nt, synthetic construct
  source 1..16: mol_type = other RNA
  modified_base order(1,2,3,5,7,9,11,12,13,15,16): mod_base = OTHER; note = 2prime-O-methyl nucleosides
  modified_base order(4,6,8,10,14): mod_base = OTHER; note = 2prime-Fluoro nucleosides
  modified_base order(1..3,14..16): mod_base = OTHER; note = Phosphorothioate linkage
aatgtaattaaagtta

SEQ ID NO: 164 - RNA, 16 nt, synthetic construct
  source 1..16: mol_type = other RNA
  modified_base order(1,2,3,5,7,9,11,12,13,15,16): mod_base = OTHER; note = 2prime-O-methyl nucleosides
  modified_base order(4,6,8,10,14): mod_base = OTHER; note = 2prime-Fluoro nucleosides
  modified_base order(1..3,14..16): mod_base = OTHER; note = Phosphorothioate linkage
ctatattattatttaa

SEQ ID NO: 165 - RNA, 16 nt, synthetic construct
  source 1..16: mol_type = other RNA
  modified_base order(1,2,3,5,7,9,11,12,13,15,16): mod_base = OTHER; note = 2prime-O-methyl nucleosides
  modified_base order(4,6,8,10,14): mod_base = OTHER; note = 2prime-Fluoro nucleosides
  modified_base order(1..3,14..16): mod_base = OTHER; note = Phosphorothioate linkage
taagaaatgaattata

SEQ ID NO: 166 - RNA, 16 nt, synthetic construct
  source 1..16: mol_type = other RNA
  modified_base order(1,2,3,5,7,9,11,12,13,15,16): mod_base = OTHER; note = 2prime-O-methyl nucleosides
  modified_base order(4,6,8,10,14): mod_base = OTHER; note = 2prime-Fluoro nucleosides
  modified_base order(1..3,14..16): mod_base = OTHER; note = Phosphorothioate linkage
gtagtgtacactgtta

SEQ ID NO: 167 - RNA, 16 nt, synthetic construct
  source 1..16: mol_type = other RNA
  modified_base order(1,2,3,5,7,9,11,12,13,15,16): mod_base = OTHER; note = 2prime-O-methyl nucleosides
  modified_base order(4,6,8,10,14): mod_base = OTHER; note = 2prime-Fluoro nucleosides
  modified_base order(1..3,14..16): mod_base = OTHER; note = Phosphorothioate linkage
attataattattatta

SEQ ID NO: 168 - RNA, 16 nt, synthetic construct
  source 1..16: mol_type = other RNA
  modified_base order(1,2,3,5,7,9,11,12,13,15,16): mod_base = OTHER; note = 2prime-O-methyl nucleosides
  modified_base order(4,6,8,10,14): mod_base = OTHER; note = 2prime-Fluoro nucleosides
  modified_base order(1..3,14..16): mod_base = OTHER; note = Phosphorothioate linkage
acaaatctctaatata

SEQ ID NO: 169 - RNA, 16 nt, synthetic construct
  source 1..16: mol_type = other RNA
  modified_base order(1,2,3,5,7,9,11,12,13,15,16): mod_base = OTHER; note = 2prime-O-methyl nucleosides
  modified_base order(4,6,8,10,14): mod_base = OTHER; note = 2prime-Fluoro nucleosides
  modified_base order(1..3,14..16): mod_base = OTHER; note = Phosphorothioate linkage
atatgcatatctgtaa

SEQ ID NO: 170 - RNA, 16 nt, synthetic construct
  source 1..16: mol_type = other RNA
  modified_base order(1,2,3,5,7,9,11,12,13,15,16): mod_base = OTHER; note = 2prime-O-methyl nucleosides
  modified_base order(4,6,8,10,14): mod_base = OTHER; note = 2prime-Fluoro nucleosides
  modified_base order(1..3,14..16): mod_base = OTHER; note = Phosphorothioate linkage
acttatatttattata

SEQ ID NO: 171 - RNA, 16 nt, synthetic construct
  source 1..16: mol_type = other RNA
  modified_base order(1,2,3,5,7,9,11,12,13,15,16): mod_base = OTHER; note = 2prime-O-methyl nucleosides
  modified_base order(4,6,8,10,14): mod_base = OTHER; note = 2prime-Fluoro nucleosides
  modified_base order(1..3,14..16): mod_base = OTHER; note = Phosphorothioate linkage
caatgcccgatagcta

SEQ ID NO: 172 - RNA, 16 nt, synthetic construct
  source 1..16: mol_type = other RNA
  modified_base order(1,2,3,5,7,9,11,12,13,15,16): mod_base = OTHER; note = 2prime-O-methyl nucleosides
  modified_base order(4,6,8,10,14): mod_base = OTHER; note = 2prime-Fluoro nucleosides
  modified_base order(1..3,14..16): mod_base = OTHER; note = Phosphorothioate linkage
actatgtcaatggtta

SEQ ID NO: 173 - RNA, 16 nt, synthetic construct
  source 1..16: mol_type = other RNA
  modified_base order(1,2,3,5,7,9,11,12,13,15,16): mod_base = OTHER; note = 2prime-O-methyl nucleosides
  modified_base order(4,6,8,10,14): mod_base = OTHER; note = 2prime-Fluoro nucleosides
  modified_base order(1..3,14..16): mod_base = OTHER; note = Phosphorothioate linkage
tttcttaatatttata

SEQ ID NO: 174 - RNA, 16 nt, synthetic construct
  source 1..16: mol_type = other RNA
  modified_base order(1,2,3,5,7,9,11,12,13,15,16): mod_base = OTHER; note = 2prime-O-methyl nucleosides
  modified_base order(4,6,8,10,14): mod_base = OTHER; note = 2prime-Fluoro nucleosides
  modified_base order(1..3,14..16): mod_base = OTHER; note = Phosphorothioate linkage
gaagagcaggatttaa

SEQ ID NO: 175 - RNA, 16 nt, synthetic construct
  source 1..16: mol_type = other RNA
  modified_base order(1,2,3,5,7,9,11,12,13,15,16): mod_base = OTHER; note = 2prime-O-methyl nucleosides
  modified_base order(4,6,8,10,14): mod_base = OTHER; note = 2prime-Fluoro nucleosides
  modified_base order(1..3,14..16): mod_base = OTHER; note = Phosphorothioate linkage
ccaaccttaagtcata

SEQ ID NO: 176 - RNA, 16 nt, synthetic construct
  source 1..16: mol_type = other RNA
  modified_base order(1,2,3,5,7,9,11,12,13,15,16): mod_base = OTHER; note = 2prime-O-methyl nucleosides
  modified_base order(4,6,8,10,14): mod_base = OTHER; note = 2prime-Fluoro nucleosides
  modified_base order(1..3,14..16): mod_base = OTHER; note = Phosphorothioate linkage
cattgacaatggttga

SEQ ID NO: 177 - RNA, 16 nt, synthetic construct
  source 1..16: mol_type = other RNA
  modified_base order(1,2,3,5,7,9,11,12,13,15,16): mod_base = OTHER; note = 2prime-O-methyl nucleosides
  modified_base order(4,6,8,10,14): mod_base = OTHER; note = 2prime-Fluoro nucleosides
  modified_base order(1..3,14..16): mod_base = OTHER; note = Phosphorothioate linkage
atgtaattaaagttga

SEQ ID NO: 178 - RNA, 16 nt, synthetic construct
  source 1..16: mol_type = other RNA
  modified_base order(1,2,3,5,7,9,11,12,13,15,16): mod_base = OTHER; note = 2prime-O-methyl nucleosides
  modified_base order(4,6,8,10,14): mod_base = OTHER; note = 2prime-Fluoro nucleosides
  modified_base order(1..3,14..16): mod_base = OTHER; note = Phosphorothioate linkage
agaaggataagtgata

SEQ ID NO: 179 - RNA, 16 nt, synthetic construct
  source 1..16: mol_type = other RNA
  modified_base order(1,2,3,5,7,9,11,12,13,15,16): mod_base = OTHER; note = 2prime-O-methyl nucleosides
  modified_base order(4,6,8,10,14): mod_base = OTHER; note = 2prime-Fluoro nucleosides
  modified_base order(1..3,14..16): mod_base = OTHER; note = Phosphorothioate linkage
atgtgacactatctca

SEQ ID NO: 180 - RNA, 16 nt, synthetic construct
  source 1..16: mol_type = other RNA
  modified_base order(1,2,3,5,7,9,11,12,13,15,16): mod_base = OTHER; note = 2prime-O-methyl nucleosides
  modified_base order(4,6,8,10,14): mod_base = OTHER; note = 2prime-Fluoro nucleosides
  modified_base order(1..3,14..16): mod_base = OTHER; note = Phosphorothioate linkage
ccaagttacatttcga

SEQ ID NO: 181 - RNA, 16 nt, synthetic construct
  source 1..16: mol_type = other RNA
  modified_base order(1,2,3,5,7,9,11,12,13,15,16): mod_base = OTHER; note = 2prime-O-methyl nucleosides
  modified_base order(4,6,8,10,14): mod_base = OTHER; note = 2prime-Fluoro nucleosides
  modified_base order(1..3,14..16): mod_base = OTHER; note = Phosphorothioate linkage
aaaggaatatgtttga

SEQ ID NO: 182 - RNA, 16 nt, synthetic construct
  source 1..16: mol_type = other RNA
  modified_base order(1,2,3,5,7,9,11,12,13,15,16): mod_base = OTHER; note = 2prime-O-methyl nucleosides
  modified_base order(4,6,8,10,14): mod_base = OTHER; note = 2prime-Fluoro nucleosides
  modified_base order(1..3,14..16): mod_base = OTHER; note = Phosphorothioate linkage
ttatagcagaagttaa

SEQ ID NO: 183 - RNA, 16 nt, synthetic construct
  source 1..16: mol_type = other RNA
  modified_base order(1,2,3,5,7,9,11,12,13,15,16): mod_base = OTHER; note = 2prime-O-methyl nucleosides
  modified_base order(4,6,8,10,14): mod_base = OTHER; note = 2prime-Fluoro nucleosides
  modified_base order(1..3,14..16): mod_base = OTHER; note = Phosphorothioate linkage
ccttgcaatagaatta

SEQ ID NO: 184 - RNA, 16 nt, synthetic construct
  source 1..16: mol_type = other RNA
  modified_base order(1,2,3,5,7,9,11,12,13,15,16): mod_base = OTHER; note = 2prime-O-methyl nucleosides
  modified_base order(4,6,8,10,14): mod_base = OTHER; note = 2prime-Fluoro nucleosides
  modified_base order(1..3,14..16): mod_base = OTHER; note = Phosphorothioate linkage
acctgtctaatcctta

SEQ ID NO: 185 - RNA, 16 nt, synthetic construct
  source 1..16: mol_type = other RNA
  modified_base order(1,2,3,5,7,9,11,12,13,15,16): mod_base = OTHER; note = 2prime-O-methyl nucleosides
  modified_base order(4,6,8,10,14): mod_base = OTHER; note = 2prime-Fluoro nucleosides
  modified_base order(1..3,14..16): mod_base = OTHER; note = Phosphorothioate linkage
caatgtctggctaata

SEQ ID NO: 186 - RNA, 16 nt, synthetic construct
  source 1..16: mol_type = other RNA
  modified_base order(1,2,3,5,7,9,11,12,13,15,16): mod_base = OTHER; note = 2prime-O-methyl nucleosides
  modified_base order(4,6,8,10,14): mod_base = OTHER; note = 2prime-Fluoro nucleosides
  modified_base order(1..3,14..16): mod_base = OTHER; note = Phosphorothioate linkage
acatgcctcagttata

SEQ ID NO: 187 - RNA, 16 nt, synthetic construct
  source 1..16: mol_type = other RNA
  modified_base order(1,2,3,5,7,9,11,12,13,15,16): mod_base = OTHER; note = 2prime-O-methyl nucleosides
  modified_base order(4,6,8,10,14): mod_base = OTHER; note = 2prime-Fluoro nucleosides
  modified_base order(1..3,14..16): mod_base = OTHER; note = Phosphorothioate linkage
attgttaacaatttaa

SEQ ID NO: 188 - RNA, 16 nt, synthetic construct
  source 1..16: mol_type = other RNA
  modified_base order(1,2,3,5,7,9,11,12,13,15,16): mod_base = OTHER; note = 2prime-O-methyl nucleosides
  modified_base order(4,6,8,10,14): mod_base = OTHER; note = 2prime-Fluoro nucleosides
  modified_base order(1..3,14..16): mod_base = OTHER; note = Phosphorothioate linkage
tagaagtgctggtaaa

SEQ ID NO: 189 - RNA, 21 nt, synthetic construct
  source 1..21: mol_type = other RNA
  modified_base order(1,3,7,9,11,13,15,17,18,19,20): mod_base = OTHER; note = 2prime-O-methyl nucleosides
  modified_base order(2,4,5,6,8,10,12,14,16,21): mod_base = OTHER; note = 2prime-Fluoro nucleosides
  modified_base order(1..3,14..21): mod_base = OTHER; note = Phosphorothioate linkage
  modified_base 1: mod_base = OTHER; note = 5prime-(E)-Vinylphosphonate
taaaccattgacatagttgtt

SEQ ID NO: 190 - RNA, 21 nt, synthetic construct
  source 1..21: mol_type = other RNA
  modified_base order(1,3,7,9,11,13,15,17,18,19,20): mod_base = OTHER; note = 2prime-O-methyl nucleosides
  modified_base order(2,4,5,6,8,10,12,14,16,21): mod_base = OTHER; note = 2prime-Fluoro nucleosides
  modified_base order(1..3,14..21): mod_base = OTHER; note = Phosphorothioate linkage
  modified_base 1: mod_base = OTHER; note = 5prime-(E)-Vinylphosphonate
ttaaagttgaacatggccatt

SEQ ID NO: 191 - RNA, 21 nt, synthetic construct
  source 1..21: mol_type = other RNA
  modified_base order(1,3,7,9,11,13,15,17,18,19,20): mod_base = OTHER; note = 2prime-O-methyl nucleosides
  modified_base order(2,4,5,6,8,10,12,14,16,21): mod_base = OTHER; note = 2prime-Fluoro nucleosides
  modified_base order(1..3,14..21): mod_base = OTHER; note = Phosphorothioate linkage
  modified_base 1: mod_base = OTHER; note = 5prime-(E)-Vinylphosphonate
ttgaatatgataatatgggtt

SEQ ID NO: 192 - RNA, 21 nt, synthetic construct
  source 1..21: mol_type = other RNA
  modified_base order(1,3,7,9,11,13,15,17,18,19,20): mod_base = OTHER; note = 2prime-O-methyl nucleosides
  modified_base order(2,4,5,6,8,10,12,14,16,21): mod_base = OTHER; note = 2prime-Fluoro nucleosides
  modified_base order(1..3,14..21): mod_base = OTHER; note = Phosphorothioate linkage
  modified_base 1: mod_base = OTHER; note = 5prime-(E)-Vinylphosphonate
tgtaattgttcccaattattt

SEQ ID NO: 193 - RNA, 21 nt, synthetic construct
  source 1..21: mol_type = other RNA
  modified_base order(1,3,7,9,11,13,15,17,18,19,20): mod_base = OTHER; note = 2prime-O-methyl nucleosides
  modified_base order(2,4,5,6,8,10,12,14,16,21): mod_base = OTHER; note = 2prime-Fluoro nucleosides
  modified_base order(1..3,14..21): mod_base = OTHER; note = Phosphorothioate linkage
  modified_base 1: mod_base = OTHER; note = 5prime-(E)-Vinylphosphonate
tcaaattgacatagggctatt

SEQ ID NO: 194 - RNA, 21 nt, synthetic construct
  source 1..21: mol_type = other RNA
  modified_base order(1,3,7,9,11,13,15,17,18,19,20): mod_base = OTHER; note = 2prime-O-methyl nucleosides
  modified_base order(2,4,5,6,8,10,12,14,16,21): mod_base = OTHER; note = 2prime-Fluoro nucleosides
  modified_base order(1..3,14..21): mod_base = OTHER; note = Phosphorothioate linkage
  modified_base 1: mod_base = OTHER; note = 5prime-(E)-Vinylphosphonate
tgaaatgtttggatccaactt

SEQ ID NO: 195 - RNA, 21 nt, synthetic construct
  source 1..21: mol_type = other RNA
  modified_base order(1,3,7,9,11,13,15,17,18,19,20): mod_base = OTHER; note = 2prime-O-methyl nucleosides
  modified_base order(2,4,5,6,8,10,12,14,16,21): mod_base = OTHER; note = 2prime-Fluoro nucleosides
  modified_base order(1..3,14..21): mod_base = OTHER; note = Phosphorothioate linkage
  modified_base 1: mod_base = OTHER; note = 5prime-(E)-Vinylphosphonate
tatcaaactgttatctctttt

SEQ ID NO: 196 - RNA, 21 nt, synthetic construct
  source 1..21: mol_type = other RNA
  modified_base order(1,3,7,9,11,13,15,17,18,19,20): mod_base = OTHER; note = 2prime-O-methyl nucleosides
  modified_base order(2,4,5,6,8,10,12,14,16,21): mod_base = OTHER; note = 2prime-Fluoro nucleosides
  modified_base order(1..3,14..21): mod_base = OTHER; note = Phosphorothioate linkage
  modified_base 1: mod_base = OTHER; note = 5prime-(E)-Vinylphosphonate
taatatgataatatgggtctt

SEQ ID NO: 197 - RNA, 21 nt, synthetic construct
  source 1..21: mol_type = other RNA
  modified_base order(1,3,7,9,11,13,15,17,18,19,20): mod_base = OTHER; note = 2prime-O-methyl nucleosides
  modified_base order(2,4,5,6,8,10,12,14,16,21): mod_base = OTHER; note = 2prime-Fluoro nucleosides
  modified_base order(1..3,14..21): mod_base = OTHER; note = Phosphorothioate linkage
  modified_base 1: mod_base = OTHER; note = 5prime-(E)-Vinylphosphonate
tatactactaagaatcccatt

SEQ ID NO: 198 - RNA, 21 nt, synthetic construct
  source 1..21: mol_type = other RNA
  modified_base order(1,3,7,9,11,13,15,17,18,19,20): mod_base = OTHER; note = 2prime-O-methyl nucleosides
  modified_base order(2,4,5,6,8,10,12,14,16,21): mod_base = OTHER; note = 2prime-Fluoro nucleosides
  modified_base order(1..3,14..21): mod_base = OTHER; note = Phosphorothioate linkage
  modified_base 1: mod_base = OTHER; note = 5prime-(E)-Vinylphosphonate
tacaaattgacatagggcttt

SEQ ID NO: 199 - RNA, 21 nt, synthetic construct
  source 1..21: mol_type = other RNA
  modified_base order(1,3,7,9,11,13,15,17,18,19,20): mod_base = OTHER; note = 2prime-O-methyl nucleosides
  modified_base order(2,4,5,6,8,10,12,14,16,21): mod_base = OTHER; note = 2prime-Fluoro nucleosides
  modified_base order(1..3,14..21): mod_base = OTHER; note = Phosphorothioate linkage
  modified_base 1: mod_base = OTHER; note = 5prime-(E)-Vinylphosphonate
tgtgggtgtttgataaccctt

SEQ ID NO: 200 - RNA, 21 nt, synthetic construct
  source 1..21: mol_type = other RNA
  modified_base order(1,3,7,9,11,13,15,17,18,19,20): mod_base = OTHER; note = 2prime-O-methyl nucleosides
  modified_base order(2,4,5,6,8,10,12,14,16,21): mod_base = OTHER; note = 2prime-Fluoro nucleosides
  modified_base order(1..3,14..21): mod_base = OTHER; note = Phosphorothioate linkage
  modified_base 1: mod_base = OTHER; note = 5prime-(E)-Vinylphosphonate
taattaatgtaattgttcctt

SEQ ID NO: 201 - RNA, 21 nt, synthetic construct
  source 1..21: mol_type = other RNA
  modified_base order(1,3,7,9,11,13,15,17,18,19,20): mod_base = OTHER; note = 2prime-O-methyl nucleosides
  modified_base order(2,4,5,6,8,10,12,14,16,21): mod_base = OTHER; note = 2prime-Fluoro nucleosides
  modified_base order(1..3,14..21): mod_base = OTHER; note = Phosphorothioate linkage
  modified_base 1: mod_base = OTHER; note = 5prime-(E)-Vinylphosphonate
tattgttcccaattattagtt

SEQ ID NO: 202 - RNA, 21 nt, synthetic construct
  source 1..21: mol_type = other RNA
  modified_base order(1,3,7,9,11,13,15,17,18,19,20): mod_base = OTHER; note = 2prime-O-methyl nucleosides
  modified_base order(2,4,5,6,8,10,12,14,16,21): mod_base = OTHER; note = 2prime-Fluoro nucleosides
  modified_base order(1..3,14..21): mod_base = OTHER; note = Phosphorothioate linkage
  modified_base 1: mod_base = OTHER; note = 5prime-(E)-Vinylphosphonate
taagtatttgttctacctttt

SEQ ID NO: 203 - RNA, 21 nt, synthetic construct
  source 1..21: mol_type = other RNA
  modified_base order(1,3,7,9,11,13,15,17,18,19,20): mod_base = OTHER; note = 2prime-O-methyl nucleosides
  modified_base order(2,4,5,6,8,10,12,14,16,21): mod_base = OTHER; note = 2prime-Fluoro nucleosides
  modified_base order(1..3,14..21): mod_base = OTHER; note = Phosphorothioate linkage
  modified_base 1: mod_base = OTHER; note = 5prime-(E)-Vinylphosphonate
taataaataacttctgctatt

SEQ ID NO: 204 - RNA, 21 nt, synthetic construct
  source 1..21: mol_type = other RNA
  modified_base order(1,3,7,9,11,13,15,17,18,19,20): mod_base = OTHER; note = 2prime-O-methyl nucleosides
  modified_base order(2,4,5,6,8,10,12,14,16,21): mod_base = OTHER; note = 2prime-Fluoro nucleosides
  modified_base order(1..3,14..21): mod_base = OTHER; note = Phosphorothioate linkage
  modified_base 1: mod_base = OTHER; note = 5prime-(E)-Vinylphosphonate
tgacagcctgaagtgcttatt

SEQ ID NO: 205 - RNA, 21 nt, synthetic construct
  source 1..21: mol_type = other RNA
  modified_base order(1,3,7,9,11,13,15,17,18,19,20): mod_base = OTHER; note = 2prime-O-methyl nucleosides
  modified_base order(2,4,5,6,8,10,12,14,16,21): mod_base = OTHER; note = 2prime-Fluoro nucleosides
  modified_base order(1..3,14..21): mod_base = OTHER; note = Phosphorothioate linkage
  modified_base 1: mod_base = OTHER; note = 5prime-(E)-Vinylphosphonate
taagaatcccatatgttattt

SEQ ID NO: 206 - RNA, 21 nt, synthetic construct
  source 1..21: mol_type = other RNA
  modified_base order(1,3,7,9,11,13,15,17,18,19,20): mod_base = OTHER; note = 2prime-O-methyl nucleosides
  modified_base order(2,4,5,6,8,10,12,14,16,21): mod_base = OTHER; note = 2prime-Fluoro nucleosides
  modified_base order(1..3,14..21): mod_base = OTHER; note = Phosphorothioate linkage
  modified_base 1: mod_base = OTHER; note = 5prime-(E)-Vinylphosphonate
taaacctattaggttgcattt

SEQ ID NO: 207 - RNA, 21 nt, synthetic construct
  source 1..21: mol_type = other RNA
  modified_base order(1,3,7,9,11,13,15,17,18,19,20): mod_base = OTHER; note = 2prime-O-methyl nucleosides
  modified_base order(2,4,5,6,8,10,12,14,16,21): mod_base = OTHER; note = 2prime-Fluoro nucleosides
  modified_base order(1..3,14..21): mod_base = OTHER; note = Phosphorothioate linkage
  modified_base 1: mod_base = OTHER; note = 5prime-(E)-Vinylphosphonate
tatagctgagacatgtggttt

SEQ ID NO: 208 - RNA, 21 nt, synthetic construct
  source 1..21: mol_type = other RNA
  modified_base order(1,3,7,9,11,13,15,17,18,19,20): mod_base = OTHER; note = 2prime-O-methyl nucleosides
  modified_base order(2,4,5,6,8,10,12,14,16,21): mod_base = OTHER; note = 2prime-Fluoro nucleosides
  modified_base order(1..3,14..21): mod_base = OTHER; note = Phosphorothioate linkage
  modified_base 1: mod_base = OTHER; note = 5prime-(E)-Vinylphosphonate
tatctttcattctttccattt

SEQ ID NO: 209 - RNA, 21 nt, synthetic construct
  source 1..21: mol_type = other RNA
  modified_base order(1,3,7,9,11,13,15,17,18,19,20): mod_base = OTHER; note = 2prime-O-methyl nucleosides
  modified_base order(2,4,5,6,8,10,12,14,16,21): mod_base = OTHER; note = 2prime-Fluoro nucleosides
  modified_base order(1..3,14..21): mod_base = OTHER; note = Phosphorothioate linkage
  modified_base 1: mod_base = OTHER; note = 5prime-(E)-Vinylphosphonate
tttcattcatttctgcccttt

SEQ ID NO: 210 - RNA, 21 nt, synthetic construct
  source 1..21: mol_type = other RNA
  modified_base order(1,3,7,9,11,13,15,17,18,19,20): mod_base = OTHER; note = 2prime-O-methyl nucleosides
  modified_base order(2,4,5,6,8,10,12,14,16,21): mod_base = OTHER; note = 2prime-Fluoro nucleosides
  modified_base order(1..3,14..21): mod_base = OTHER; note = Phosphorothioate linkage
  modified_base 1: mod_base = OTHER; note = 5prime-(E)-Vinylphosphonate
tacaacatggacatgggtctt

SEQ ID NO: 211 - RNA, 21 nt, synthetic construct
  source 1..21: mol_type = other RNA
  modified_base order(1,3,7,9,11,13,15,17,18,19,20): mod_base = OTHER; note = 2prime-O-methyl nucleosides
  modified_base order(2,4,5,6,8,10,12,14,16,21): mod_base = OTHER; note = 2prime-Fluoro nucleosides
  modified_base order(1..3,14..21): mod_base = OTHER; note = Phosphorothioate linkage
  modified_base 1: mod_base = OTHER; note = 5prime-(E)-Vinylphosphonate
taatacatgttactattaatt

SEQ ID NO: 212 - RNA, 21 nt, synthetic construct
  source 1..21: mol_type = other RNA
  modified_base order(1,3,7,9,11,13,15,17,18,19,20): mod_base = OTHER; note = 2prime-O-methyl nucleosides
  modified_base order(2,4,5,6,8,10,12,14,16,21): mod_base = OTHER; note = 2prime-Fluoro nucleosides
  modified_base order(1..3,14..21): mod_base = OTHER; note = Phosphorothioate linkage
  modified_base 1: mod_base = OTHER; note = 5prime-(E)-Vinylphosphonate
tacttctatttcaaagccatt

SEQ ID NO: 213 - RNA, 21 nt, synthetic construct
  source 1..21: mol_type = other RNA
  modified_base order(1,3,7,9,11,13,15,17,18,19,20): mod_base = OTHER; note = 2prime-O-methyl nucleosides
  modified_base order(2,4,5,6,8,10,12,14,16,21): mod_base = OTHER; note = 2prime-Fluoro nucleosides
  modified_base order(1..3,14..21): mod_base = OTHER; note = Phosphorothioate linkage
  modified_base 1: mod_base = OTHER; note = 5prime-(E)-Vinylphosphonate
taaactgttatctctttaatt

SEQ ID NO: 214 - RNA, 21 nt, synthetic construct
  source 1..21: mol_type = other RNA
  modified_base order(1,3,7,9,11,13,15,17,18,19,20): mod_base = OTHER; note = 2prime-O-methyl nucleosides
  modified_base order(2,4,5,6,8,10,12,14,16,21): mod_base = OTHER; note = 2prime-Fluoro nucleosides
  modified_base order(1..3,14..21): mod_base = OTHER; note = Phosphorothioate linkage
  modified_base 1: mod_base = OTHER; note = 5prime-(E)-Vinylphosphonate
taatatcaacccattgtcatt

SEQ ID NO: 215 - RNA, 21 nt, synthetic construct
  source 1..21: mol_type = other RNA
  modified_base order(1,3,7,9,11,13,15,17,18,19,20): mod_base = OTHER; note = 2prime-O-methyl nucleosides
  modified_base order(2,4,5,6,8,10,12,14,16,21): mod_base = OTHER; note = 2prime-Fluoro nucleosides
  modified_base order(1..3,14..21): mod_base = OTHER; note = Phosphorothioate linkage
  modified_base 1: mod_base = OTHER; note = 5prime-(E)-Vinylphosphonate
taacagtgtacaactactgtt

SEQ ID NO: 216 - RNA, 21 nt, synthetic construct
  source 1..21: mol_type = other RNA
  modified_base order(1,3,7,9,11,13,15,17,18,19,20): mod_base = OTHER; note = 2prime-O-methyl nucleosides
  modified_base order(2,4,5,6,8,10,12,14,16,21): mod_base = OTHER; note = 2prime-Fluoro nucleosides
  modified_base order(1..3,14..21): mod_base = OTHER; note = Phosphorothioate linkage
  modified_base 1: mod_base = OTHER; note = 5prime-(E)-Vinylphosphonate
ttaacttctgctataaacatt

SEQ ID NO: 217 - RNA, 21 nt, synthetic construct
  source 1..21: mol_type = other RNA
  modified_base order(1,3,7,9,11,13,15,17,18,19,20): mod_base = OTHER; note = 2prime-O-methyl nucleosides
  modified_base order(2,4,5,6,8,10,12,14,16,21): mod_base = OTHER; note = 2prime-Fluoro nucleosides
  modified_base order(1..3,14..21): mod_base = OTHER; note = Phosphorothioate linkage
  modified_base 1: mod_base = OTHER; note = 5prime-(E)-Vinylphosphonate
tgccatctactcttgcctttt

SEQ ID NO: 218 - RNA, 21 nt, synthetic construct
  source 1..21: mol_type = other RNA
  modified_base order(1,3,7,9,11,13,15,17,18,19,20): mod_base = OTHER; note = 2prime-O-methyl nucleosides
  modified_base order(2,4,5,6,8,10,12,14,16,21): mod_base = OTHER; note = 2prime-Fluoro nucleosides
  modified_base order(1..3,14..21): mod_base = OTHER; note = Phosphorothioate linkage
  modified_base 1: mod_base = OTHER; note = 5prime-(E)-Vinylphosphonate
tcagatatgcatatgcacatt

SEQ ID NO: 219 - RNA, 21 nt, synthetic construct
  source 1..21: mol_type = other RNA
  modified_base order(1,3,7,9,11,13,15,17,18,19,20): mod_base = OTHER; note = 2prime-O-methyl nucleosides
  modified_base order(2,4,5,6,8,10,12,14,16,21): mod_base = OTHER; note = 2prime-Fluoro nucleosides
  modified_base order(1..3,14..21): mod_base = OTHER; note = Phosphorothioate linkage
  modified_base 1: mod_base = OTHER; note = 5prime-(E)-Vinylphosphonate
tacaggcttcagattatcttt

SEQ ID NO: 220 - RNA, 21 nt, synthetic construct
  source 1..21: mol_type = other RNA
  modified_base order(1,3,7,9,11,13,15,17,18,19,20): mod_base = OTHER; note = 2prime-O-methyl nucleosides
  modified_base order(2,4,5,6,8,10,12,14,16,21): mod_base = OTHER; note = 2prime-Fluoro nucleosides
  modified_base order(1..3,14..21): mod_base = OTHER; note = Phosphorothioate linkage
  modified_base 1: mod_base = OTHER; note = 5prime-(E)-Vinylphosphonate
tttaactcagaaaccttaatt

SEQ ID NO: 221 - RNA, 21 nt, synthetic construct
  source 1..21: mol_type = other RNA
  modified_base order(1,3,7,9,11,13,15,17,18,19,20): mod_base = OTHER; note = 2prime-O-methyl nucleosides
  modified_base order(2,4,5,6,8,10,12,14,16,21): mod_base = OTHER; note = 2prime-Fluoro nucleosides
  modified_base order(1..3,14..21): mod_base = OTHER; note = Phosphorothioate linkage
  modified_base 1: mod_base = OTHER; note = 5prime-(E)-Vinylphosphonate
tagaaatgtttggatccaatt

SEQ ID NO: 222 - RNA, 21 nt, synthetic construct
  source 1..21: mol_type = other RNA
  modified_base order(1,3,7,9,11,13,15,17,18,19,20): mod_base = OTHER; note = 2prime-O-methyl nucleosides
  modified_base order(2,4,5,6,8,10,12,14,16,21): mod_base = OTHER; note = 2prime-Fluoro nucleosides
  modified_base order(1..3,14..21): mod_base = OTHER; note = Phosphorothioate linkage
  modified_base 1: mod_base = OTHER; note = 5prime-(E)-Vinylphosphonate
tattacatttctctgcttctt

SEQ ID NO: 223 - RNA, 21 nt, synthetic construct
  source 1..21: mol_type = other RNA
  modified_base order(1,3,7,9,11,13,15,17,18,19,20): mod_base = OTHER; note = 2prime-O-methyl nucleosides
  modified_base order(2,4,5,6,8,10,12,14,16,21): mod_base = OTHER; note = 2prime-Fluoro nucleosides
  modified_base order(1..3,14..21): mod_base = OTHER; note = Phosphorothioate linkage
  modified_base 1: mod_base = OTHER; note = 5prime-(E)-Vinylphosphonate
tagattacttccaatacaatt

SEQ ID NO: 224 - RNA, 21 nt, synthetic construct
  source 1..21: mol_type = other RNA
  modified_base order(1,3,7,9,11,13,15,17,18,19,20): mod_base = OTHER; note = 2prime-O-methyl nucleosides
  modified_base order(2,4,5,6,8,10,12,14,16,21): mod_base = OTHER; note = 2prime-Fluoro nucleosides
  modified_base order(1..3,14..21): mod_base = OTHER; note = Phosphorothioate linkage
  modified_base 1: mod_base = OTHER; note = 5prime-(E)-Vinylphosphonate
ttacagatatgcatatgcatt

SEQ ID NO: 225 - RNA, 21 nt, synthetic construct
  source 1..21: mol_type = other RNA
  modified_base order(1,3,7,9,11,13,15,17,18,19,20): mod_base = OTHER; note = 2prime-O-methyl nucleosides
  modified_base order(2,4,5,6,8,10,12,14,16,21): mod_base = OTHER; note = 2prime-Fluoro nucleosides
  modified_base order(1..3,14..21): mod_base = OTHER; note = Phosphorothioate linkage
  modified_base 1: mod_base = OTHER; note = 5prime-(E)-Vinylphosphonate
tcagattacttccaatacatt

SEQ ID NO: 226 - RNA, 21 nt, synthetic construct
  source 1..21: mol_type = other RNA
  modified_base order(1,3,7,9,11,13,15,17,18,19,20): mod_base = OTHER; note = 2prime-O-methyl nucleosides
  modified_base order(2,4,5,6,8,10,12,14,16,21): mod_base = OTHER; note = 2prime-Fluoro nucleosides
  modified_base order(1..3,14..21): mod_base = OTHER; note = Phosphorothioate linkage
  modified_base 1: mod_base = OTHER; note = 5prime-(E)-Vinylphosphonate
tgtaagtgtatttgcccagtt

SEQ ID NO: 227 - RNA, 21 nt, synthetic construct
  source 1..21: mol_type = other RNA
  modified_base order(1,3,7,9,11,13,15,17,18,19,20): mod_base = OTHER; note = 2prime-O-methyl nucleosides
  modified_base order(2,4,5,6,8,10,12,14,16,21): mod_base = OTHER; note = 2prime-Fluoro nucleosides
  modified_base order(1..3,14..21): mod_base = OTHER; note = Phosphorothioate linkage
  modified_base 1: mod_base = OTHER; note = 5prime-(E)-Vinylphosphonate
tgagcttctaagattggtgtt

SEQ ID NO: 228 - RNA, 21 nt, synthetic construct
  source 1..21: mol_type = other RNA
  modified_base order(1,3,7,9,11,13,15,17,18,19,20): mod_base = OTHER; note = 2prime-O-methyl nucleosides
  modified_base order(2,4,5,6,8,10,12,14,16,21): mod_base = OTHER; note = 2prime-Fluoro nucleosides
  modified_base order(1..3,14..21): mod_base = OTHER; note = Phosphorothioate linkage
  modified_base 1: mod_base = OTHER; note = 5prime-(E)-Vinylphosphonate
taaccattgacatagttgatt

SEQ ID NO: 229 - RNA, 21 nt, synthetic construct
  source 1..21: mol_type = other RNA
  modified_base order(1,3,7,9,11,13,15,17,18,19,20): mod_base = OTHER; note = 2prime-O-methyl nucleosides
  modified_base order(2,4,5,6,8,10,12,14,16,21): mod_base = OTHER; note = 2prime-Fluoro nucleosides
  modified_base order(1..3,14..21): mod_base = OTHER; note = Phosphorothioate linkage
  modified_base 1: mod_base = OTHER; note = 5prime-(E)-Vinylphosphonate
tataaatattaagaaaccatt

SEQ ID NO: 230 - RNA, 21 nt, synthetic construct
  source 1..21: mol_type = other RNA
  modified_base order(1,3,7,9,11,13,15,17,18,19,20): mod_base = OTHER; note = 2prime-O-methyl nucleosides
  modified_base order(2,4,5,6,8,10,12,14,16,21): mod_base = OTHER; note = 2prime-Fluoro nucleosides
  modified_base order(1..3,14..21): mod_base = OTHER; note = Phosphorothioate linkage
  modified_base 1: mod_base = OTHER; note = 5prime-(E)-Vinylphosphonate
ttaaatatgaaattggttgtt

SEQ ID NO: 231 - RNA, 21 nt, synthetic construct
  source 1..21: mol_type = other RNA
  modified_base order(1,3,7,9,11,13,15,17,18,19,20): mod_base = OTHER; note = 2prime-O-methyl nucleosides
  modified_base order(2,4,5,6,8,10,12,14,16,21): mod_base = OTHER; note = 2prime-Fluoro nucleosides
  modified_base order(1..3,14..21): mod_base = OTHER; note = Phosphorothioate linkage
  modified_base 1: mod_base = OTHER; note = 5prime-(E)-Vinylphosphonate
tccaaacagacattggttatt

SEQ ID NO: 232 - RNA, 21 nt, synthetic construct
  source 1..21: mol_type = other RNA
  modified_base order(1,3,7,9,11,13,15,17,18,19,20): mod_base = OTHER; note = 2prime-O-methyl nucleosides
  modified_base order(2,4,5,6,8,10,12,14,16,21): mod_base = OTHER; note = 2prime-Fluoro nucleosides
  modified_base order(1..3,14..21): mod_base = OTHER; note = Phosphorothioate linkage
  modified_base 1: mod_base = OTHER; note = 5prime-(E)-Vinylphosphonate
taagcttctgatttaagattt

SEQ ID NO: 233 - RNA, 21 nt, synthetic construct
  source 1..21: mol_type = other RNA
  modified_base order(1,3,7,9,11,13,15,17,18,19,20): mod_base = OTHER; note = 2prime-O-methyl nucleosides
  modified_base order(2,4,5,6,8,10,12,14,16,21): mod_base = OTHER; note = 2prime-Fluoro nucleosides
  modified_base order(1..3,14..21): mod_base = OTHER; note = Phosphorothioate linkage
  modified_base 1: mod_base = OTHER; note = 5prime-(E)-Vinylphosphonate
tacagcttctcagtgatactt

SEQ ID NO: 234 - RNA, 21 nt, synthetic construct
  source 1..21: mol_type = other RNA
  modified_base order(1,3,7,9,11,13,15,17,18,19,20): mod_base = OTHER; note = 2prime-O-methyl nucleosides
  modified_base order(2,4,5,6,8,10,12,14,16,21): mod_base = OTHER; note = 2prime-Fluoro nucleosides
  modified_base order(1..3,14..21): mod_base = OTHER; note = Phosphorothioate linkage
  modified_base 1: mod_base = OTHER; note = 5prime-(E)-Vinylphosphonate
ttatagcctatccttcttatt

SEQ ID NO: 235 - RNA, 21 nt, synthetic construct
  source 1..21: mol_type = other RNA
  modified_base order(1,3,7,9,11,13,15,17,18,19,20): mod_base = OTHER; note = 2prime-O-methyl nucleosides
  modified_base order(2,4,5,6,8,10,12,14,16,21): mod_base = OTHER; note = 2prime-Fluoro nucleosides
  modified_base order(1..3,14..21): mod_base = OTHER; note = Phosphorothioate linkage
  modified_base 1: mod_base = OTHER; note = 5prime-(E)-Vinylphosphonate
tcgaaatgtaacttggtattt

SEQ ID NO: 236 - RNA, 21 nt, synthetic construct
  source 1..21: mol_type = other RNA
  modified_base order(1,3,7,9,11,13,15,17,18,19,20): mod_base = OTHER; note = 2prime-O-methyl nucleosides
  modified_base order(2,4,5,6,8,10,12,14,16,21): mod_base = OTHER; note = 2prime-Fluoro nucleosides
  modified_base order(1..3,14..21): mod_base = OTHER; note = Phosphorothioate linkage
  modified_base 1: mod_base = OTHER; note = 5prime-(E)-Vinylphosphonate
tataaataacttctgctattt

SEQ ID NO: 237 - RNA, 21 nt, synthetic construct
  source 1..21: mol_type = other RNA
  modified_base order(1,3,7,9,11,13,15,17,18,19,20): mod_base = OTHER; note = 2prime-O-methyl nucleosides
  modified_base order(2,4,5,6,8,10,12,14,16,21): mod_base = OTHER; note = 2prime-Fluoro nucleosides
  modified_base order(1..3,14..21): mod_base = OTHER; note = Phosphorothioate linkage
  modified_base 1: mod_base = OTHER; note = 5prime-(E)-Vinylphosphonate
taaaccattgacatagttgtt

SEQ ID NO: 238 - RNA, 21 nt, synthetic construct
  source 1..21: mol_type = other RNA
  modified_base order(1,3,7,9,11,13,15,17,18,19,20): mod_base = OTHER; note = 2prime-O-methyl nucleosides
  modified_base order(2,4,5,6,8,10,12,14,16,21): mod_base = OTHER; note = 2prime-Fluoro nucleosides
  modified_base order(1..3,14..21): mod_base = OTHER; note = Phosphorothioate linkage
  modified_base 1: mod_base = OTHER; note = 5prime-(E)-Vinylphosphonate
taatatctaatattgttaatt

SEQ ID NO: 239 - RNA, 21 nt, synthetic construct
  source 1..21: mol_type = other RNA
  modified_base order(1,3,7,9,11,13,15,17,18,19,20): mod_base = OTHER; note = 2prime-O-methyl nucleosides
  modified_base order(2,4,5,6,8,10,12,14,16,21): mod_base = OTHER; note = 2prime-Fluoro nucleosides
  modified_base order(1..3,14..21): mod_base = OTHER; note = Phosphorothioate linkage
  modified_base 1: mod_base = OTHER; note = 5prime-(E)-Vinylphosphonate
tagaaatgtttgaatccaatt

SEQ ID NO: 240 - RNA, 21 nt, synthetic construct
  source 1..21: mol_type = other RNA
  modified_base order(1,3,7,9,11,13,15,17,18,19,20): mod_base = OTHER; note = 2prime-O-methyl nucleosides
  modified_base order(2,4,5,6,8,10,12,14,16,21): mod_base = OTHER; note = 2prime-Fluoro nucleosides
  modified_base order(1..3,14..21): mod_base = OTHER; note = Phosphorothioate linkage
  modified_base 1: mod_base = OTHER; note = 5prime-(E)-Vinylphosphonate
tgaaatgtttgaatccaactt

SEQ ID NO: 241 - RNA, 21 nt, synthetic construct
  source 1..21: mol_type = other RNA
  modified_base order(1,3,7,9,11,13,15,17,18,19,20): mod_base = OTHER; note = 2prime-O-methyl nucleosides
  modified_base order(2,4,5,6,8,10,12,14,16,21): mod_base = OTHER; note = 2prime-Fluoro nucleosides
  modified_base order(1..3,14..21): mod_base = OTHER; note = Phosphorothioate linkage
  modified_base 1: mod_base = OTHER; note = 5prime-(E)-Vinylphosphonate
ttaaatgaataactgattatt

SEQ ID NO: 242 - RNA, 21 nt, synthetic construct
  source 1..21: mol_type = other RNA
  modified_base order(1,3,7,9,11,13,15,17,18,19,20): mod_base = OTHER; note = 2prime-O-methyl nucleosides
  modified_base order(2,4,5,6,8,10,12,14,16,21): mod_base = OTHER; note = 2prime-Fluoro nucleosides
  modified_base order(1..3,14..21): mod_base = OTHER; note = Phosphorothioate linkage
  modified_base 1: mod_base = OTHER; note = 5prime-(E)-Vinylphosphonate
tcaatttaaattctattgctt

SEQ ID NO: 243 - RNA, 21 nt, synthetic construct
  source 1..21: mol_type = other RNA
  modified_base order(1,3,7,9,11,13,15,17,18,19,20): mod_base = OTHER; note = 2prime-O-methyl nucleosides
  modified_base order(2,4,5,6,8,10,12,14,16,21): mod_base = OTHER; note = 2prime-Fluoro nucleosides
  modified_base order(1..3,14..21): mod_base = OTHER; note = Phosphorothioate linkage
  modified_base 1: mod_base = OTHER; note = 5prime-(E)-Vinylphosphonate
taataattataattataattt

SEQ ID NO: 244 - RNA, 21 nt, synthetic construct
  source 1..21: mol_type = other RNA
  modified_base order(1,3,7,9,11,13,15,17,18,19,20): mod_base = OTHER; note = 2prime-O-methyl nucleosides
  modified_base order(2,4,5,6,8,10,12,14,16,21): mod_base = OTHER; note = 2prime-Fluoro nucleosides
  modified_base order(1..3,14..21): mod_base = OTHER; note = Phosphorothioate linkage
  modified_base 1: mod_base = OTHER; note = 5prime-(E)-Vinylphosphonate
taaacctattaggttgcattt

SEQ ID NO: 245 - RNA, 21 nt, synthetic construct
  source 1..21: mol_type = other RNA
  modified_base order(1,3,7,9,11,13,15,17,18,19,20): mod_base = OTHER; note = 2prime-O-methyl nucleosides
  modified_base order(2,4,5,6,8,10,12,14,16,21): mod_base = OTHER; note = 2prime-Fluoro nucleosides
  modified_base order(1..3,14..21): mod_base = OTHER; note = Phosphorothioate linkage
  modified_base 1: mod_base = OTHER; note = 5prime-(E)-Vinylphosphonate
tgacagcctgaagtgcttatt

SEQ ID NO: 246 - RNA, 21 nt, synthetic construct
  source 1..21: mol_type = other RNA
  modified_base order(1,3,7,9,11,13,15,17,18,19,20): mod_base = OTHER; note = 2prime-O-methyl nucleosides
  modified_base order(2,4,5,6,8,10,12,14,16,21): mod_base = OTHER; note = 2prime-Fluoro nucleosides
  modified_base order(1..3,14..21): mod_base = OTHER; note = Phosphorothioate linkage
  modified_base 1: mod_base = OTHER; note = 5prime-(E)-Vinylphosphonate
taaacagttcagagggcgctt

SEQ ID NO: 247 - RNA, 21 nt, synthetic construct
  source 1..21: mol_type = other RNA
  modified_base order(1,3,7,9,11,13,15,17,18,19,20): mod_base = OTHER; note = 2prime-O-methyl nucleosides
  modified_base order(2,4,5,6,8,10,12,14,16,21): mod_base = OTHER; note = 2prime-Fluoro nucleosides
  modified_base order(1..3,14..21): mod_base = OTHER; note = Phosphorothioate linkage
  modified_base 1: mod_base = OTHER; note = 5prime-(E)-Vinylphosphonate
tcaatatctaatattgttatt

SEQ ID NO: 248 - RNA, 21 nt, synthetic construct
  source 1..21: mol_type = other RNA
  modified_base order(1,3,7,9,11,13,15,17,18,19,20): mod_base = OTHER; note = 2prime-O-methyl nucleosides
  modified_base order(2,4,5,6,8,10,12,14,16,21): mod_base = OTHER; note = 2prime-Fluoro nucleosides
  modified_base order(1..3,14..21): mod_base = OTHER; note = Phosphorothioate linkage
  modified_base 1: mod_base = OTHER; note = 5prime-(E)-Vinylphosphonate
tccaaccgttatctctttatt

SEQ ID NO: 249 - RNA, 21 nt, synthetic construct
  source 1..21: mol_type = other RNA
  modified_base order(1,3,7,9,11,13,15,17,18,19,20): mod_base = OTHER; note = 2prime-O-methyl nucleosides
  modified_base order(2,4,5,6,8,10,12,14,16,21): mod_base = OTHER; note = 2prime-Fluoro nucleosides
  modified_base order(1..3,14..21): mod_base = OTHER; note = Phosphorothioate linkage
  modified_base 1: mod_base = OTHER; note = 5prime-(E)-Vinylphosphonate
tggactgacttaatgctaatt

SEQ ID NO: 250 - RNA, 21 nt, synthetic construct
  source 1..21: mol_type = other RNA
  modified_base order(1,3,7,9,11,13,15,17,18,19,20): mod_base = OTHER; note = 2prime-O-methyl nucleosides
  modified_base order(2,4,5,6,8,10,12,14,16,21): mod_base = OTHER; note = 2prime-Fluoro nucleosides
  modified_base order(1..3,14..21): mod_base = OTHER; note = Phosphorothioate linkage
  modified_base 1: mod_base = OTHER; note = 5prime-(E)-Vinylphosphonate
ttatgtaaatgaataactgtt

SEQ ID NO: 251 - RNA, 21 nt, synthetic construct
  source 1..21: mol_type = other RNA
  modified_base order(1,3,7,9,11,13,15,17,18,19,20): mod_base = OTHER; note = 2prime-O-methyl nucleosides
  modified_base order(2,4,5,6,8,10,12,14,16,21): mod_base = OTHER; note = 2prime-Fluoro nucleosides
  modified_base order(1..3,14..21): mod_base = OTHER; note = Phosphorothioate linkage
  modified_base 1: mod_base = OTHER; note = 5prime-(E)-Vinylphosphonate
tatgactttaatctatggatt

SEQ ID NO: 252 - RNA, 21 nt, synthetic construct
  source 1..21: mol_type = other RNA
  modified_base order(1,3,7,9,11,13,15,17,18,19,20): mod_base = OTHER; note = 2prime-O-methyl nucleosides
  modified_base order(2,4,5,6,8,10,12,14,16,21): mod_base = OTHER; note = 2prime-Fluoro nucleosides
  modified_base order(1..3,14..21): mod_base = OTHER; note = Phosphorothioate linkage
  modified_base 1: mod_base = OTHER; note = 5prime-(E)-Vinylphosphonate
tagaaatgattcactttattt

SEQ ID NO: 253 - RNA, 21 nt, synthetic construct
  source 1..21: mol_type = other RNA
  modified_base order(1,3,7,9,11,13,15,17,18,19,20): mod_base = OTHER; note = 2prime-O-methyl nucleosides
  modified_base order(2,4,5,6,8,10,12,14,16,21): mod_base = OTHER; note = 2prime-Fluoro nucleosides
  modified_base order(1..3,14..21): mod_base = OTHER; note = Phosphorothioate linkage
  modified_base 1: mod_base = OTHER; note = 5prime-(E)-Vinylphosphonate
ttaaattctattgcaaggctt

SEQ ID NO: 254 - RNA, 21 nt, synthetic construct
  source 1..21: mol_type = other RNA
  modified_base order(1,3,7,9,11,13,15,17,18,19,20): mod_base = OTHER; note = 2prime-O-methyl nucleosides
  modified_base order(2,4,5,6,8,10,12,14,16,21): mod_base = OTHER; note = 2prime-Fluoro nucleosides
  modified_base order(1..3,14..21): mod_base = OTHER; note = Phosphorothioate linkage
  modified_base 1: mod_base = OTHER; note = 5prime-(E)-Vinylphosphonate
tagagatttgtacaactcctt

SEQ ID NO: 255 - RNA, 21 nt, synthetic construct
  source 1..21: mol_type = other RNA
  modified_base order(1,3,7,9,11,13,15,17,18,19,20): mod_base = OTHER; note = 2prime-O-methyl nucleosides
  modified_base order(2,4,5,6,8,10,12,14,16,21): mod_base = OTHER; note = 2prime-Fluoro nucleosides
  modified_base order(1..3,14..21): mod_base = OTHER; note = Phosphorothioate linkage
  modified_base 1: mod_base = OTHER; note = 5prime-(E)-Vinylphosphonate
taatatcaaccattgtcaatt

SEQ ID NO: 256 - RNA, 21 nt, synthetic construct
  source 1..21: mol_type = other RNA
  modified_base order(1,3,7,9,11,13,15,17,18,19,20): mod_base = OTHER; note = 2prime-O-methyl nucleosides
  modified_base order(2,4,5,6,8,10,12,14,16,21): mod_base = OTHER; note = 2prime-Fluoro nucleosides
  modified_base order(1..3,14..21): mod_base = OTHER; note = Phosphorothioate linkage
  modified_base 1: mod_base = OTHER; note = 5prime-(E)-Vinylphosphonate
tataaataacttctgctattt

SEQ ID NO: 257 - RNA, 21 nt, synthetic construct
  source 1..21: mol_type = other RNA
  modified_base order(1,3,7,9,11,13,15,17,18,19,20): mod_base = OTHER; note = 2prime-O-methyl nucleosides
  modified_base order(2,4,5,6,8,10,12,14,16,21): mod_base = OTHER; note = 2prime-Fluoro nucleosides
  modified_base order(1..3,14..21): mod_base = OTHER; note = Phosphorothioate linkage
  modified_base 1: mod_base = OTHER; note = 5prime-(E)-Vinylphosphonate
tgataaggtatattgacggtt

SEQ ID NO: 258 - RNA, 21 nt, synthetic construct
  source 1..21: mol_type = other RNA
  modified_base order(1,3,7,9,11,13,15,17,18,19,20): mod_base = OTHER; note = 2prime-O-methyl nucleosides
  modified_base order(2,4,5,6,8,10,12,14,16,21): mod_base = OTHER; note = 2prime-Fluoro nucleosides
  modified_base order(1..3,14..21): mod_base = OTHER; note = Phosphorothioate linkage
  modified_base 1: mod_base = OTHER; note = 5prime-(E)-Vinylphosphonate
taaacttcaaacaagtccgtt

SEQ ID NO: 259 - RNA, 21 nt, synthetic construct
  source 1..21: mol_type = other RNA
  modified_base order(1,3,7,9,11,13,15,17,18,19,20): mod_base = OTHER; note = 2prime-O-methyl nucleosides
  modified_base order(2,4,5,6,8,10,12,14,16,21): mod_base = OTHER; note = 2prime-Fluoro nucleosides
  modified_base order(1..3,14..21): mod_base = OTHER; note = Phosphorothioate linkage
  modified_base 1: mod_base = OTHER; note = 5prime-(E)-Vinylphosphonate
taactttaattacattagctt

SEQ ID NO: 260 - RNA, 21 nt, synthetic construct
  source 1..21: mol_type = other RNA
  modified_base order(1,3,7,9,11,13,15,17,18,19,20): mod_base = OTHER; note = 2prime-O-methyl nucleosides
  modified_base order(2,4,5,6,8,10,12,14,16,21): mod_base = OTHER; note = 2prime-Fluoro nucleosides
  modified_base order(1..3,14..21): mod_base = OTHER; note = Phosphorothioate linkage
  modified_base 1: mod_base = OTHER; note = 5prime-(E)-Vinylphosphonate
ttaaataataatatagctgtt

SEQ ID NO: 261 - RNA, 21 nt, synthetic construct
  source 1..21: mol_type = other RNA
  modified_base order(1,3,7,9,11,13,15,17,18,19,20): mod_base = OTHER; note = 2prime-O-methyl nucleosides
  modified_base order(2,4,5,6,8,10,12,14,16,21): mod_base = OTHER; note = 2prime-Fluoro nucleosides
  modified_base order(1..3,14..21): mod_base = OTHER; note = Phosphorothioate linkage
  modified_base 1: mod_base = OTHER; note = 5prime-(E)-Vinylphosphonate
tataattcatttcttatgctt

SEQ ID NO: 262 - RNA, 21 nt, synthetic construct
  source 1..21: mol_type = other RNA
  modified_base order(1,3,7,9,11,13,15,17,18,19,20): mod_base = OTHER; note = 2prime-O-methyl nucleosides
  modified_base order(2,4,5,6,8,10,12,14,16,21): mod_base = OTHER; note = 2prime-Fluoro nucleosides
  modified_base order(1..3,14..21): mod_base = OTHER; note = Phosphorothioate linkage
  modified_base 1: mod_base = OTHER; note = 5prime-(E)-Vinylphosphonate
taacagtgtacactactgttt

SEQ ID NO: 263 - RNA, 21 nt, synthetic construct
  source 1..21: mol_type = other RNA
  modified_base order(1,3,7,9,11,13,15,17,18,19,20): mod_base = OTHER; note = 2prime-O-methyl nucleosides
  modified_base order(2,4,5,6,8,10,12,14,16,21): mod_base = OTHER; note = 2prime-Fluoro nucleosides
  modified_base order(1..3,14..21): mod_base = OTHER; note = Phosphorothioate linkage
  modified_base 1: mod_base = OTHER; note = 5prime-(E)-Vinylphosphonate
taataataattataattattt

SEQ ID NO: 264 - RNA, 21 nt, synthetic construct
  source 1..21: mol_type = other RNA
  modified_base order(1,3,7,9,11,13,15,17,18,19,20): mod_base = OTHER; note = 2prime-O-methyl nucleosides
  modified_base order(2,4,5,6,8,10,12,14,16,21): mod_base = OTHER; note = 2prime-Fluoro nucleosides
  modified_base order(1..3,14..21): mod_base = OTHER; note = Phosphorothioate linkage
  modified_base 1: mod_base = OTHER; note = 5prime-(E)-Vinylphosphonate
tatattagagatttgtacatt

SEQ ID NO: 265 - RNA, 21 nt, synthetic construct
  source 1..21: mol_type = other RNA
  modified_base order(1,3,7,9,11,13,15,17,18,19,20): mod_base = OTHER; note = 2prime-O-methyl nucleosides
  modified_base order(2,4,5,6,8,10,12,14,16,21): mod_base = OTHER; note = 2prime-Fluoro nucleosides
  modified_base order(1..3,14..21): mod_base = OTHER; note = Phosphorothioate linkage
  modified_base 1: mod_base = OTHER; note = 5prime-(E)-Vinylphosphonate
ttacagatatgcatatgcatt

SEQ ID NO: 266 - RNA, 21 nt, synthetic construct
  source 1..21: mol_type = other RNA
  modified_base order(1,3,7,9,11,13,15,17,18,19,20): mod_base = OTHER; note = 2prime-O-methyl nucleosides
  modified_base order(2,4,5,6,8,10,12,14,16,21): mod_base = OTHER; note = 2prime-Fluoro nucleosides
  modified_base order(1..3,14..21): mod_base = OTHER; note = Phosphorothioate linkage
  modified_base 1: mod_base = OTHER; note = 5prime-(E)-Vinylphosphonate
tataataaatataagttgatt

SEQ ID NO: 267 - RNA, 21 nt, synthetic construct
  source 1..21: mol_type = other RNA
  modified_base order(1,3,7,9,11,13,15,17,18,19,20): mod_base = OTHER; note = 2prime-O-methyl nucleosides
  modified_base order(2,4,5,6,8,10,12,14,16,21): mod_base = OTHER; note = 2prime-Fluoro nucleosides
  modified_base order(1..3,14..21): mod_base = OTHER; note = Phosphorothioate linkage
  modified_base 1: mod_base = OTHER; note = 5prime-(E)-Vinylphosphonate
tagctatcgggcattgctgtt

SEQ ID NO: 268 - RNA, 21 nt, synthetic construct
  source 1..21: mol_type = other RNA
  modified_base order(1,3,7,9,11,13,15,17,18,19,20): mod_base = OTHER; note = 2prime-O-methyl nucleosides
  modified_base order(2,4,5,6,8,10,12,14,16,21): mod_base = OTHER; note = 2prime-Fluoro nucleosides
  modified_base order(1..3,14..21): mod_base = OTHER; note = Phosphorothioate linkage
  modified_base 1: mod_base = OTHER; note = 5prime-(E)-Vinylphosphonate
taaccattgacatagttgatt

SEQ ID NO: 269 - RNA, 21 nt, synthetic construct
  source 1..21: mol_type = other RNA
  modified_base order(1,3,7,9,11,13,15,17,18,19,20): mod_base = OTHER; note = 2prime-O-methyl nucleosides
  modified_base order(2,4,5,6,8,10,12,14,16,21): mod_base = OTHER; note = 2prime-Fluoro nucleosides
  modified_base order(1..3,14..21): mod_base = OTHER; note = Phosphorothioate linkage
  modified_base 1: mod_base = OTHER; note = 5prime-(E)-Vinylphosphonate
tataaatattaagaaaccatt

SEQ ID NO: 270 - RNA, 21 nt, synthetic construct
  source 1..21: mol_type = other RNA
  modified_base order(1,3,7,9,11,13,15,17,18,19,20): mod_base = OTHER; note = 2prime-O-methyl nucleosides
  modified_base order(2,4,5,6,8,10,12,14,16,21): mod_base = OTHER; note = 2prime-Fluoro nucleosides
  modified_base order(1..3,14..21): mod_base = OTHER; note = Phosphorothioate linkage
  modified_base 1: mod_base = OTHER; note = 5prime-(E)-Vinylphosphonate
ttaaatcctgctcttcccatt

SEQ ID NO: 271 - RNA, 21 nt, synthetic construct
  source 1..21: mol_type = other RNA
  modified_base order(1,3,7,9,11,13,15,17,18,19,20): mod_base = OTHER; note = 2prime-O-methyl nucleosides
  modified_base order(2,4,5,6,8,10,12,14,16,21): mod_base = OTHER; note = 2prime-Fluoro nucleosides
  modified_base order(1..3,14..21): mod_base = OTHER; note = Phosphorothioate linkage
  modified_base 1: mod_base = OTHER; note = 5prime-(E)-Vinylphosphonate
tatgacttaaggttggcaatt

SEQ ID NO: 272 - RNA, 21 nt, synthetic construct
  source 1..21: mol_type = other RNA
  modified_base order(1,3,7,9,11,13,15,17,18,19,20): mod_base = OTHER; note = 2prime-O-methyl nucleosides
  modified_base order(2,4,5,6,8,10,12,14,16,21): mod_base = OTHER; note = 2prime-Fluoro nucleosides
  modified_base order(1..3,14..21): mod_base = OTHER; note = Phosphorothioate linkage
  modified_base 1: mod_base = OTHER; note = 5prime-(E)-Vinylphosphonate
tcaaccattgtcaatgcactt

SEQ ID NO: 273 - RNA, 21 nt, synthetic construct
  source 1..21: mol_type = other RNA
  modified_base order(1,3,7,9,11,13,15,17,18,19,20): mod_base = OTHER; note = 2prime-O-methyl nucleosides
  modified_base order(2,4,5,6,8,10,12,14,16,21): mod_base = OTHER; note = 2prime-Fluoro nucleosides
  modified_base order(1..3,14..21): mod_base = OTHER; note = Phosphorothioate linkage
  modified_base 1: mod_base = OTHER; note = 5prime-(E)-Vinylphosphonate
tcaactttaattacattagtt

SEQ ID NO: 274 - RNA, 21 nt, synthetic construct
  source 1..21: mol_type = other RNA
  modified_base order(1,3,7,9,11,13,15,17,18,19,20): mod_base = OTHER; note = 2prime-O-methyl nucleosides
  modified_base order(2,4,5,6,8,10,12,14,16,21): mod_base = OTHER; note = 2prime-Fluoro nucleosides
  modified_base order(1..3,14..21): mod_base = OTHER; note = Phosphorothioate linkage
  modified_base 1: mod_base = OTHER; note = 5prime-(E)-Vinylphosphonate
tatcacttatccttcttaatt

SEQ ID NO: 275 - RNA, 21 nt, synthetic construct
  source 1..21: mol_type = other RNA
  modified_base order(1,3,7,9,11,13,15,17,18,19,20): mod_base = OTHER; note = 2prime-O-methyl nucleosides
  modified_base order(2,4,5,6,8,10,12,14,16,21): mod_base = OTHER; note = 2prime-Fluoro nucleosides
  modified_base order(1..3,14..21): mod_base = OTHER; note = Phosphorothioate linkage
  modified_base 1: mod_base = OTHER; note = 5prime-(E)-Vinylphosphonate
tgagatagtgtcacatagatt

SEQ ID NO: 276 - RNA, 21 nt, synthetic construct
  source 1..21: mol_type = other RNA
  modified_base order(1,3,7,9,11,13,15,17,18,19,20): mod_base = OTHER; note = 2prime-O-methyl nucleosides
  modified_base order(2,4,5,6,8,10,12,14,16,21): mod_base = OTHER; note = 2prime-Fluoro nucleosides
  modified_base order(1..3,14..21): mod_base = OTHER; note = Phosphorothioate linkage
  modified_base 1: mod_base = OTHER; note = 5prime-(E)-Vinylphosphonate
tcgaaatgtaacttggtattt

SEQ ID NO: 277 - RNA, 21 nt, synthetic construct
  source 1..21: mol_type = other RNA
  modified_base order(1,3,7,9,11,13,15,17,18,19,20): mod_base = OTHER; note = 2prime-O-methyl nucleosides
  modified_base order(2,4,5,6,8,10,12,14,16,21): mod_base = OTHER; note = 2prime-Fluoro nucleosides
  modified_base order(1..3,14..21): mod_base = OTHER; note = Phosphorothioate linkage
  modified_base 1: mod_base = OTHER; note = 5prime-(E)-Vinylphosphonate
tcaaacatattcctttcaatt

SEQ ID NO: 278 - RNA, 21 nt, synthetic construct
  source 1..21: mol_type = other RNA
  modified_base order(1,3,7,9,11,13,15,17,18,19,20): mod_base = OTHER; note = 2prime-O-methyl nucleosides
  modified_base order(2,4,5,6,8,10,12,14,16,21): mod_base = OTHER; note = 2prime-Fluoro nucleosides
  modified_base order(1..3,14..21): mod_base = OTHER; note = Phosphorothioate linkage
  modified_base 1: mod_base = OTHER; note = 5prime-(E)-Vinylphosphonate
ttaacttctgctataaacatt

SEQ ID NO: 279 - RNA, 21 nt, synthetic construct
  source 1..21: mol_type = other RNA
  modified_base order(1,3,7,9,11,13,15,17,18,19,20): mod_base = OTHER; note = 2prime-O-methyl nucleosides
  modified_base order(2,4,5,6,8,10,12,14,16,21): mod_base = OTHER; note = 2prime-Fluoro nucleosides
  modified_base order(1..3,14..21): mod_base = OTHER; note = Phosphorothioate linkage
  modified_base 1: mod_base = OTHER; note = 5prime-(E)-Vinylphosphonate
taattctattgcaaggccatt

SEQ ID NO: 280 - RNA, 21 nt, synthetic construct
  source 1..21: mol_type = other RNA
  modified_base order(1,3,7,9,11,13,15,17,18,19,20): mod_base = OTHER; note = 2prime-O-methyl nucleosides
  modified_base order(2,4,5,6,8,10,12,14,16,21): mod_base = OTHER; note = 2prime-Fluoro nucleosides
  modified_base order(1..3,14..21): mod_base = OTHER; note = Phosphorothioate linkage
  modified_base 1: mod_base = OTHER; note = 5prime-(E)-Vinylphosphonate
taaggattagacaggtcaatt

SEQ ID NO: 281 - RNA, 21 nt, synthetic construct
  source 1..21: mol_type = other RNA
  modified_base order(1,3,7,9,11,13,15,17,18,19,20): mod_base = OTHER; note = 2prime-O-methyl nucleosides
  modified_base order(2,4,5,6,8,10,12,14,16,21): mod_base = OTHER; note = 2prime-Fluoro nucleosides
  modified_base order(1..3,14..21): mod_base = OTHER; note = Phosphorothioate linkage
  modified_base 1: mod_base = OTHER; note = 5prime-(E)-Vinylphosphonate
tattagccagacattggtttt

SEQ ID NO: 282 - RNA, 21 nt, synthetic construct
  source 1..21: mol_type = other RNA
  modified_base order(1,3,7,9,11,13,15,17,18,19,20): mod_base = OTHER; note = 2prime-O-methyl nucleosides
  modified_base order(2,4,5,6,8,10,12,14,16,21): mod_base = OTHER; note = 2prime-Fluoro nucleosides
  modified_base order(1..3,14..21): mod_base = OTHER; note = Phosphorothioate linkage
  modified_base 1: mod_base = OTHER; note = 5prime-(E)-Vinylphosphonate
tataactgaggcatgtttgtt

SEQ ID NO: 283 - RNA, 21 nt, synthetic construct
  source 1..21: mol_type = other RNA
  modified_base order(1,3,7,9,11,13,15,17,18,19,20): mod_base = OTHER; note = 2prime-O-methyl nucleosides
  modified_base order(2,4,5,6,8,10,12,14,16,21): mod_base = OTHER; note = 2prime-Fluoro nucleosides
  modified_base order(1..3,14..21): mod_base = OTHER; note = Phosphorothioate linkage
  modified_base 1: mod_base = OTHER; note = 5prime-(E)-Vinylphosphonate
ttaaattgttaacaatatctt

SEQ ID NO: 284 - RNA, 21 nt, synthetic construct
  source 1..21: mol_type = other RNA
  modified_base order(1,3,7,9,11,13,15,17,18,19,20): mod_base = OTHER; note = 2prime-O-methyl nucleosides
  modified_base order(2,4,5,6,8,10,12,14,16,21): mod_base = OTHER; note = 2prime-Fluoro nucleosides
  modified_base order(1..3,14..21): mod_base = OTHER; note = Phosphorothioate linkage
  modified_base 1: mod_base = OTHER; note = 5prime-(E)-Vinylphosphonate
tttaccagcacttctacaatt

SEQ ID NO: 285 - RNA, 16 nt, synthetic construct
  source 1..16: mol_type = other RNA
  modified_base order(1,2,3,5,7,9,11,12,13,15,16): mod_base = OTHER; note = 2prime-O-methyl nucleosides
  modified_base order(4,6,8,10,14): mod_base = OTHER; note = 2prime-Fluoro nucleosides
  modified_base order(1..3,14..16): mod_base = OTHER; note = Phosphorothioate linkage
agaaataagaacaaga

SEQ ID NO: 286 - RNA, 16 nt, synthetic construct
  source 1..16: mol_type = other RNA
  modified_base order(1,2,3,5,7,9,11,12,13,15,16): mod_base = OTHER; note = 2prime-O-methyl nucleosides
  modified_base order(4,6,8,10,14): mod_base = OTHER; note = 2prime-Fluoro nucleosides
  modified_base order(1..3,14..16): mod_base = OTHER; note = Phosphorothioate linkage
taatgcatgtgcgtga

SEQ ID NO: 287 - RNA, 16 nt, synthetic construct
  source 1..16: mol_type = other RNA
  modified_base order(1,2,3,5,7,9,11,12,13,15,16): mod_base = OTHER; note = 2prime-O-methyl nucleosides
  modified_base order(4,6,8,10,14): mod_base = OTHER; note = 2prime-Fluoro nucleosides
  modified_base order(1..3,14..16): mod_base = OTHER; note = Phosphorothioate linkage
ccagaatagaagccaa

SEQ ID NO: 288 - RNA, 16 nt, synthetic construct
  source 1..16: mol_type = other RNA
  modified_base order(1,2,3,5,7,9,11,12,13,15,16): mod_base = OTHER; note = 2prime-O-methyl nucleosides
  modified_base order(4,6,8,10,14): mod_base = OTHER; note = 2prime-Fluoro nucleosides
  modified_base order(1..3,14..16): mod_base = OTHER; note = Phosphorothioate linkage
gcaagcccaaatgtta

SEQ ID NO: 289 - RNA, 16 nt, synthetic construct
  source 1..16: mol_type = other RNA
  modified_base order(1,2,3,5,7,9,11,12,13,15,16): mod_base = OTHER; note = 2prime-O-methyl nucleosides
  modified_base order(4,6,8,10,14): mod_base = OTHER; note = 2prime-Fluoro nucleosides
  modified_base order(1..3,14..16): mod_base = OTHER; note = Phosphorothioate linkage
caagcccaaatgttga

SEQ ID NO: 290 - RNA, 16 nt, synthetic construct
  source 1..16: mol_type = other RNA
  modified_base order(1,2,3,5,7,9,11,12,13,15,16): mod_base = OTHER; note = 2prime-O-methyl nucleosides
  modified_base order(4,6,8,10,14): mod_base = OTHER; note = 2prime-Fluoro nucleosides
  modified_base order(1..3,14..16): mod_base = OTHER; note = Phosphorothioate linkage
actcctacaacagtga

SEQ ID NO: 291 - RNA, 16 nt, synthetic construct
  source 1..16: mol_type = other RNA
  modified_base order(1,2,3,5,7,9,11,12,13,15,16): mod_base = OTHER; note = 2prime-O-methyl nucleosides
  modified_base order(4,6,8,10,14): mod_base = OTHER; note = 2prime-Fluoro nucleosides
  modified_base order(1..3,14..16): mod_base = OTHER; note = Phosphorothioate linkage
cctgaatccaacttaa

SEQ ID NO: 292 - RNA, 16 nt, synthetic construct
  source 1..16: mol_type = other RNA
  modified_base order(1,2,3,5,7,9,11,12,13,15,16): mod_base = OTHER; note = 2prime-O-methyl nucleosides
  modified_base order(4,6,8,10,14): mod_base = OTHER; note = 2prime-Fluoro nucleosides
  modified_base order(1..3,14..16): mod_base = OTHER; note = Phosphorothioate linkage
atgggactggattata

SEQ ID NO: 293 - RNA, 16 nt, synthetic construct
  source 1..16: mol_type = other RNA
  modified_base order(1,2,3,5,7,9,11,12,13,15,16): mod_base = OTHER; note = 2prime-O-methyl nucleosides
  modified_base order(4,6,8,10,14): mod_base = OTHER; note = 2prime-Fluoro nucleosides
  modified_base order(1..3,14..16): mod_base = OTHER; note = Phosphorothioate linkage
gctcaggagagtgtga

SEQ ID NO: 294 - RNA, 16 nt, synthetic construct
  source 1..16: mol_type = other RNA
  modified_base order(1,2,3,5,7,9,11,12,13,15,16): mod_base = OTHER; note = 2prime-O-methyl nucleosides
  modified_base order(4,6,8,10,14): mod_base = OTHER; note = 2prime-Fluoro nucleosides
  modified_base order(1..3,14..16): mod_base = OTHER; note = Phosphorothioate linkage
gagagtgtgaatttga

SEQ ID NO: 295 - RNA, 16 nt, synthetic construct
  source 1..16: mol_type = other RNA
  modified_base order(1,2,3,5,7,9,11,12,13,15,16): mod_base = OTHER; note = 2prime-O-methyl nucleosides
  modified_base order(4,6,8,10,14): mod_base = OTHER; note = 2prime-Fluoro nucleosides
  modified_base order(1..3,14..16): mod_base = OTHER; note = Phosphorothioate linkage
agagtgtgaatttgta

SEQ ID NO: 296 - RNA, 16 nt, synthetic construct
  source 1..16: mol_type = other RNA
  modified_base order(1,2,3,5,7,9,11,12,13,15,16): mod_base = OTHER; note = 2prime-O-methyl nucleosides
  modified_base order(4,6,8,10,14): mod_base = OTHER; note = 2prime-Fluoro nucleosides
  modified_base order(1..3,14..16): mod_base = OTHER; note = Phosphorothioate linkage
ttaatatgctatatta

SEQ ID NO: 297 - RNA, 16 nt, synthetic construct
  source 1..16: mol_type = other RNA
  modified_base order(1,2,3,5,7,9,11,12,13,15,16): mod_base = OTHER; note = 2prime-O-methyl nucleosides
  modified_base order(4,6,8,10,14): mod_base = OTHER; note = 2prime-Fluoro nucleosides
  modified_base order(1..3,14..16): mod_base = OTHER; note = Phosphorothioate linkage
gcaaagaacaaataaa

SEQ ID NO: 298 - RNA, 16 nt, synthetic construct
  source 1..16: mol_type = other RNA
  modified_base order(1,2,3,5,7,9,11,12,13,15,16): mod_base = OTHER; note = 2prime-O-methyl nucleosides
  modified_base order(4,6,8,10,14): mod_base = OTHER; note = 2prime-Fluoro nucleosides
  modified_base order(1..3,14..16): mod_base = OTHER; note = Phosphorothioate linkage
caaagaacaaataata

SEQ ID NO: 299 - RNA, 15 nt, synthetic construct
  source 1..15: mol_type = other RNA
  modified_base order(2,4,6,8,10,12,14): mod_base = OTHER; note = 2prime-O-methyl nucleosides
  modified_base order(1,3,5,7,9,11,13,15): mod_base = OTHER; note = 2prime-Fluoro nucleosides
  modified_base order(1..3,13..15): mod_base = OTHER; note = Phosphorothioate linkage
aagaacaaataataa

SEQ ID NO: 300 - RNA, 16 nt, synthetic construct
  source 1..16: mol_type = other RNA
  modified_base order(1,2,3,5,7,9,11,12,13,15,16): mod_base = OTHER; note = 2prime-O-methyl nucleosides
  modified_base order(4,6,8,10,14): mod_base = OTHER; note = 2prime-Fluoro nucleosides
  modified_base order(1..3,14..16): mod_base = OTHER; note = Phosphorothioate linkage
ttaggttagaaattta

SEQ ID NO: 301 - RNA, 16 nt, synthetic construct
  source 1..16: mol_type = other RNA
  modified_base order(1,2,3,5,7,9,11,12,13,15,16): mod_base = OTHER; note = 2prime-O-methyl nucleosides
  modified_base order(4,6,8,10,14): mod_base = OTHER; note = 2prime-Fluoro nucleosides
  modified_base order(1..3,14..16): mod_base = OTHER; note = Phosphorothioate linkage
gcaccacaggctgtaa

SEQ ID NO: 302 - RNA, 16 nt, synthetic construct
  source 1..16: mol_type = other RNA
  modified_base order(1,2,3,5,7,9,11,12,13,15,16): mod_base = OTHER; note = 2prime-O-methyl nucleosides
  modified_base order(4,6,8,10,14): mod_base = OTHER; note = 2prime-Fluoro nucleosides
  modified_base order(1..3,14..16): mod_base = OTHER; note = Phosphorothioate linkage
caagctacagtgtata

SEQ ID NO: 303 - RNA, 16 nt, synthetic construct
  source 1..16: mol_type = other RNA
  modified_base order(1,2,3,5,7,9,11,12,13,15,16): mod_base = OTHER; note = 2prime-O-methyl nucleosides
  modified_base order(4,6,8,10,14): mod_base = OTHER; note = 2prime-Fluoro nucleosides
  modified_base order(1..3,14..16): mod_base = OTHER; note = Phosphorothioate linkage
gcattcaaccaccaaa

SEQ ID NO: 304 - RNA, 16 nt, synthetic construct
  source 1..16: mol_type = other RNA
  modified_base order(1,2,3,5,7,9,11,12,13,15,16): mod_base = OTHER; note = 2prime-O-methyl nucleosides
  modified_base order(4,6,8,10,14): mod_base = OTHER; note = 2prime-Fluoro nucleosides
  modified_base order(1..3,14..16): mod_base = OTHER; note = Phosphorothioate linkage
atgttgtatgatttca

SEQ ID NO: 305 - RNA, 16 nt, synthetic construct
  source 1..16: mol_type = other RNA
  modified_base order(1,2,3,5,7,9,11,12,13,15,16): mod_base = OTHER; note = 2prime-O-methyl nucleosides
  modified_base order(4,6,8,10,14): mod_base = OTHER; note = 2prime-Fluoro nucleosides
  modified_base order(1..3,14..16): mod_base = OTHER; note = Phosphorothioate linkage
gtatgatttccagaga

SEQ ID NO: 306 - RNA, 16 nt, synthetic construct
  source 1..16: mol_type = other RNA
  modified_base order(1,2,3,5,7,9,11,12,13,15,16): mod_base = OTHER; note = 2prime-O-methyl nucleosides
  modified_base order(4,6,8,10,14): mod_base = OTHER; note = 2prime-Fluoro nucleosides
  modified_base order(1..3,14..16): mod_base = OTHER; note = Phosphorothioate linkage
agatcaaattacatta

SEQ ID NO: 307 - RNA, 16 nt, synthetic construct
  source 1..16: mol_type = other RNA
  modified_base order(1,2,3,5,7,9,11,12,13,15,16): mod_base = OTHER; note = 2prime-O-methyl nucleosides
  modified_base order(4,6,8,10,14): mod_base = OTHER; note = 2prime-Fluoro nucleosides
  modified_base order(1..3,14..16): mod_base = OTHER; note = Phosphorothioate linkage
caaattacatttatga

SEQ ID NO: 308 - RNA, 16 nt, synthetic construct
  source 1..16: mol_type = other RNA
  modified_base order(1,2,3,5,7,9,11,12,13,15,16): mod_base = OTHER; note = 2prime-O-methyl nucleosides
  modified_base order(4,6,8,10,14): mod_base = OTHER; note = 2prime-Fluoro nucleosides
  modified_base order(1..3,14..16): mod_base = OTHER; note = Phosphorothioate linkage
ttatttcctaacagta

SEQ ID NO: 309 - RNA, 16 nt, synthetic construct
  source 1..16: mol_type = other RNA
  modified_base order(1,2,3,5,7,9,11,12,13,15,16): mod_base = OTHER; note = 2prime-O-methyl nucleosides
  modified_base order(4,6,8,10,14): mod_base = OTHER; note = 2prime-Fluoro nucleosides
  modified_base order(1..3,14..16): mod_base = OTHER; note = Phosphorothioate linkage
atttcctaacagttta

SEQ ID NO: 310 - RNA, 16 nt, synthetic construct
  source 1..16: mol_type = other RNA
  modified_base order(1,2,3,5,7,9,11,12,13,15,16): mod_base = OTHER; note = 2prime-O-methyl nucleosides
  modified_base order(4,6,8,10,14): mod_base = OTHER; note = 2prime-Fluoro nucleosides
  modified_base order(1..3,14..16): mod_base = OTHER; note = Phosphorothioate linkage
tttcctaacagtttca

SEQ ID NO: 311 - RNA, 16 nt, synthetic construct
  source 1..16: mol_type = other RNA
  modified_base order(1,2,3,5,7,9,11,12,13,15,16): mod_base = OTHER; note = 2prime-O-methyl nucleosides
  modified_base order(4,6,8,10,14): mod_base = OTHER; note = 2prime-Fluoro nucleosides
  modified_base order(1..3,14..16): mod_base = OTHER; note = Phosphorothioate linkage
gaagaatctatatgta

SEQ ID NO: 312 - RNA, 16 nt, synthetic construct
  source 1..16: mol_type = other RNA
  modified_base order(1,2,3,5,7,9,11,12,13,15,16): mod_base = OTHER; note = 2prime-O-methyl nucleosides
  modified_base order(4,6,8,10,14): mod_base = OTHER; note = 2prime-Fluoro nucleosides
  modified_base order(1..3,14..16): mod_base = OTHER; note = Phosphorothioate linkage
aagaatctatatgtaa

SEQ ID NO: 313 - RNA, 16 nt, synthetic construct
  source 1..16: mol_type = other RNA
  modified_base order(1,2,3,5,7,9,11,12,13,15,16): mod_base = OTHER; note = 2prime-O-methyl nucleosides
  modified_base order(4,6,8,10,14): mod_base = OTHER; note = 2prime-Fluoro nucleosides
  modified_base order(1..3,14..16): mod_base = OTHER; note = Phosphorothioate linkage
gaatctatatgtagca

SEQ ID NO: 314 - RNA, 16 nt, synthetic construct
  source 1..16: mol_type = other RNA
  modified_base order(1,2,3,5,7,9,11,12,13,15,16): mod_base = OTHER; note = 2prime-O-methyl nucleosides
  modified_base order(4,6,8,10,14): mod_base = OTHER; note = 2prime-Fluoro nucleosides
  modified_base order(1..3,14..16): mod_base = OTHER; note = Phosphorothioate linkage
aaagtgtaggattgta

SEQ ID NO: 315 - RNA, 16 nt, synthetic construct
  source 1..16: mol_type = other RNA
  modified_base order(1,2,3,5,7,9,11,12,13,15,16): mod_base = OTHER; note = 2prime-O-methyl nucleosides
  modified_base order(4,6,8,10,14): mod_base = OTHER; note = 2prime-Fluoro nucleosides
  modified_base order(1..3,14..16): mod_base = OTHER; note = Phosphorothioate linkage
aagtgtaggattgtta

SEQ ID NO: 316 - RNA, 16 nt, synthetic construct
  source 1..16: mol_type = other RNA
  modified_base order(1,2,3,5,7,9,11,12,13,15,16): mod_base = OTHER; note = 2prime-O-methyl nucleosides
  modified_base order(4,6,8,10,14): mod_base = OTHER; note = 2prime-Fluoro nucleosides
  modified_base order(1..3,14..16): mod_base = OTHER; note = Phosphorothioate linkage
tacacttatatttgta

SEQ ID NO: 317 - RNA, 16 nt, synthetic construct
  source 1..16: mol_type = other RNA
  modified_base order(1,2,3,5,7,9,11,12,13,15,16): mod_base = OTHER; note = 2prime-O-methyl nucleosides
  modified_base order(4,6,8,10,14): mod_base = OTHER; note = 2prime-Fluoro nucleosides
  modified_base order(1..3,14..16): mod_base = OTHER; note = Phosphorothioate linkage
ttatatttgtattgta

SEQ ID NO: 318 - RNA, 16 nt, synthetic construct
  source 1..16: mol_type = other RNA
  modified_base order(1,2,3,5,7,9,11,12,13,15,16): mod_base = OTHER; note = 2prime-O-methyl nucleosides
  modified_base order(4,6,8,10,14): mod_base = OTHER; note = 2prime-Fluoro nucleosides
  modified_base order(1..3,14..16): mod_base = OTHER; note = Phosphorothioate linkage
gtattgtatacttgga

SEQ ID NO: 319 - RNA, 16 nt, synthetic construct
  source 1..16: mol_type = other RNA
  modified_base order(1,2,3,5,7,9,11,12,13,15,16): mod_base = OTHER; note = 2prime-O-methyl nucleosides
  modified_base order(4,6,8,10,14): mod_base = OTHER; note = 2prime-Fluoro nucleosides
  modified_base order(1..3,14..16): mod_base = OTHER; note = Phosphorothioate linkage
tattgtatacttggta

SEQ ID NO: 320 - RNA, 16 nt, synthetic construct
  source 1..16: mol_type = other RNA
  modified_base order(1,2,3,5,7,9,11,12,13,15,16): mod_base = OTHER; note = 2prime-O-methyl nucleosides
  modified_base order(4,6,8,10,14): mod_base = OTHER; note = 2prime-Fluoro nucleosides
  modified_base order(1..3,14..16): mod_base = OTHER; note = Phosphorothioate linkage
acaaagtaggaatgga

SEQ ID NO: 321 - RNA, 16 nt, synthetic construct
  source 1..16: mol_type = other RNA
  modified_base order(1,2,3,5,7,9,11,12,13,15,16): mod_base = OTHER; note = 2prime-O-methyl nucleosides
  modified_base order(4,6,8,10,14): mod_base = OTHER; note = 2prime-Fluoro nucleosides
  modified_base order(1..3,14..16): mod_base = OTHER; note = Phosphorothioate linkage
ggaaagaagaatctta

SEQ ID NO: 322 - RNA, 16 nt, synthetic construct
  source 1..16: mol_type = other RNA
  modified_base order(1,2,3,5,7,9,11,12,13,15,16): mod_base = OTHER; note = 2prime-O-methyl nucleosides
  modified_base order(4,6,8,10,14): mod_base = OTHER; note = 2prime-Fluoro nucleosides
  modified_base order(1..3,14..16): mod_base = OTHER; note = Phosphorothioate linkage
cagccaaacagtatta

SEQ ID NO: 323 - RNA, 16 nt, synthetic construct
  source 1..16: mol_type = other RNA
  modified_base order(1,2,3,5,7,9,11,12,13,15,16): mod_base = OTHER; note = 2prime-O-methyl nucleosides
  modified_base order(4,6,8,10,14): mod_base = OTHER; note = 2prime-Fluoro nucleosides
  modified_base order(1..3,14..16): mod_base = OTHER; note = Phosphorothioate linkage
cctttatcacatggca

SEQ ID NO: 324 - RNA, 16 nt, synthetic construct
  source 1..16: mol_type = other RNA
  modified_base order(1,2,3,5,7,9,11,12,13,15,16): mod_base = OTHER; note = 2prime-O-methyl nucleosides
  modified_base order(4,6,8,10,14): mod_base = OTHER; note = 2prime-Fluoro nucleosides
  modified_base order(1..3,14..16): mod_base = OTHER; note = Phosphorothioate linkage
aaatgactggttctaa

SEQ ID NO: 325 - RNA, 16 nt, synthetic construct
  source 1..16: mol_type = other RNA
  modified_base order(1,2,3,5,7,9,11,12,13,15,16): mod_base = OTHER; note = 2prime-O-methyl nucleosides
  modified_base order(4,6,8,10,14): mod_base = OTHER; note = 2prime-Fluoro nucleosides
  modified_base order(1..3,14..16): mod_base = OTHER; note = Phosphorothioate linkage
ctctgaaacaattaca

SEQ ID NO: 326 - RNA, 16 nt, synthetic construct
  source 1..16: mol_type = other RNA
  modified_base order(1,2,3,5,7,9,11,12,13,15,16): mod_base = OTHER; note = 2prime-O-methyl nucleosides
  modified_base order(4,6,8,10,14): mod_base = OTHER; note = 2prime-Fluoro nucleosides
  modified_base order(1..3,14..16): mod_base = OTHER; note = Phosphorothioate linkage
aaacaattacatttaa

SEQ ID NO: 327 - RNA, 16 nt, synthetic construct
  source 1..16: mol_type = other RNA
  modified_base order(1,2,3,5,7,9,11,12,13,15,16): mod_base = OTHER; note = 2prime-O-methyl nucleosides
  modified_base order(4,6,8,10,14): mod_base = OTHER; note = 2prime-Fluoro nucleosides
  modified_base order(1..3,14..16): mod_base = OTHER; note = Phosphorothioate linkage
aacaattacatttata

SEQ ID NO: 328 - RNA, 16 nt, synthetic construct
  source 1..16: mol_type = other RNA
  modified_base order(1,2,3,5,7,9,11,12,13,15,16): mod_base = OTHER; note = 2prime-O-methyl nucleosides
  modified_base order(4,6,8,10,14): mod_base = OTHER; note = 2prime-Fluoro nucleosides
  modified_base order(1..3,14..16): mod_base = OTHER; note = Phosphorothioate linkage
acaattacatttataa

SEQ ID NO: 329 - RNA, 16 nt, synthetic construct
  source 1..16: mol_type = other RNA
  modified_base order(1,2,3,5,7,9,11,12,13,15,16): mod_base = OTHER; note = 2prime-O-methyl nucleosides
  modified_base order(4,6,8,10,14): mod_base = OTHER; note = 2prime-Fluoro nucleosides
  modified_base order(1..3,14..16): mod_base = OTHER; note = Phosphorothioate linkage
ttatataatatgtata

SEQ ID NO: 330 - RNA, 16 nt, synthetic construct
  source 1..16: mol_type = other RNA
  modified_base order(1,2,3,5,7,9,11,12,13,15,16): mod_base = OTHER; note = 2prime-O-methyl nucleosides
  modified_base order(4,6,8,10,14): mod_base = OTHER; note = 2prime-Fluoro nucleosides
  modified_base order(1..3,14..16): mod_base = OTHER; note = Phosphorothioate linkage
tatgtatacaatatta

SEQ ID NO: 331 - RNA, 16 nt, synthetic construct
  source 1..16: mol_type = other RNA
  modified_base order(1,2,3,5,7,9,11,12,13,15,16): mod_base = OTHER; note = 2prime-O-methyl nucleosides
  modified_base order(4,6,8,10,14): mod_base = OTHER; note = 2prime-Fluoro nucleosides
  modified_base order(1..3,14..16): mod_base = OTHER; note = Phosphorothioate linkage
atgtatacaatattga

SEQ ID NO: 332 - RNA, 16 nt, synthetic construct
  source 1..16: mol_type = other RNA
  modified_base order(1,2,3,5,7,9,11,12,13,15,16): mod_base = OTHER; note = 2prime-O-methyl nucleosides
  modified_base order(4,6,8,10,14): mod_base = OTHER; note = 2prime-Fluoro nucleosides
  modified_base order(1..3,14..16): mod_base = OTHER; note = Phosphorothioate linkage
tatacaatattgttta

SEQ ID NO: 333 - RNA, 16 nt, synthetic construct
  source 1..16: mol_type = other RNA
  modified_base order(1,2,3,5,7,9,11,12,13,15,16): mod_base = OTHER; note = 2prime-O-methyl nucleosides
  modified_base order(4,6,8,10,14): mod_base = OTHER; note = 2prime-Fluoro nucleosides
  modified_base order(1..3,14..16): mod_base = OTHER; note = Phosphorothioate linkage
ttgtaaataagtgtca

SEQ ID NO: 334 - RNA, 16 nt, synthetic construct
  source 1..16: mol_type = other RNA
  modified_base order(1,2,3,5,7,9,11,12,13,15,16): mod_base = OTHER; note = 2prime-O-methyl nucleosides
  modified_base order(4,6,8,10,14): mod_base = OTHER; note = 2prime-Fluoro nucleosides
  modified_base order(1..3,14..16): mod_base = OTHER; note = Phosphorothioate linkage
gtaaataagtgtctca

SEQ ID NO: 335 - RNA, 16 nt, synthetic construct
  source 1..16: mol_type = other RNA
  modified_base order(1,2,3,5,7,9,11,12,13,15,16): mod_base = OTHER; note = 2prime-O-methyl nucleosides
  modified_base order(4,6,8,10,14): mod_base = OTHER; note = 2prime-Fluoro nucleosides
  modified_base order(1..3,14..16): mod_base = OTHER; note = Phosphorothioate linkage
taaataagtgtctcca

SEQ ID NO: 336 - RNA, 16 nt, synthetic construct
  source 1..16: mol_type = other RNA
  modified_base order(1,2,3,5,7,9,11,12,13,15,16): mod_base = OTHER; note = 2prime-O-methyl nucleosides
  modified_base order(4,6,8,10,14): mod_base = OTHER; note = 2prime-Fluoro nucleosides
  modified_base order(1..3,14..16): mod_base = OTHER; note = Phosphorothioate linkage
aaataagtgtctccta

SEQ ID NO: 337 - RNA, 16 nt, synthetic construct
  source 1..16: mol_type = other RNA
  modified_base order(1,2,3,5,7,9,11,12,13,15,16): mod_base = OTHER; note = 2prime-O-methyl nucleosides
  modified_base order(4,6,8,10,14): mod_base = OTHER; note = 2prime-Fluoro nucleosides
  modified_base order(1..3,14..16): mod_base = OTHER; note = Phosphorothioate linkage
ataagtgtctccttta

SEQ ID NO: 338 - RNA, 16 nt, synthetic construct
  source 1..16: mol_type = other RNA
  modified_base order(1,2,3,5,7,9,11,12,13,15,16): mod_base = OTHER; note = 2prime-O-methyl nucleosides
  modified_base order(4,6,8,10,14): mod_base = OTHER; note = 2prime-Fluoro nucleosides
  modified_base order(1..3,14..16): mod_base = OTHER; note = Phosphorothioate linkage
acactaatgaaattta

SEQ ID NO: 339 - RNA, 16 nt, synthetic construct
  source 1..16: mol_type = other RNA
  modified_base order(1,2,3,5,7,9,11,12,13,15,16): mod_base = OTHER; note = 2prime-O-methyl nucleosides
  modified_base order(4,6,8,10,14): mod_base = OTHER; note = 2prime-Fluoro nucleosides
  modified_base order(1..3,14..16): mod_base = OTHER; note = Phosphorothioate linkage
cactaatgaaatttca

SEQ ID NO: 340 - RNA, 16 nt, synthetic construct
  source 1..16: mol_type = other RNA
  modified_base order(1,2,3,5,7,9,11,12,13,15,16): mod_base = OTHER; note = 2prime-O-methyl nucleosides
  modified_base order(4,6,8,10,14): mod_base = OTHER; note = 2prime-Fluoro nucleosides
  modified_base order(1..3,14..16): mod_base = OTHER; note = Phosphorothioate linkage
actaatgaaatttcaa

SEQ ID NO: 341 - RNA, 16 nt, synthetic construct
  source 1..16: mol_type = other RNA
  modified_base order(1,2,3,5,7,9,11,12,13,15,16): mod_base = OTHER; note = 2prime-O-methyl nucleosides
  modified_base order(4,6,8,10,14): mod_base = OTHER; note = 2prime-Fluoro nucleosides
  modified_base order(1..3,14..16): mod_base = OTHER; note = Phosphorothioate linkage
aaatttcaaatcatta

SEQ ID NO: 342 - RNA, 16 nt, synthetic construct
  source 1..16: mol_type = other RNA
  modified_base order(1,2,3,5,7,9,11,12,13,15,16): mod_base = OTHER; note = 2prime-O-methyl nucleosides
  modified_base order(4,6,8,10,14): mod_base = OTHER; note = 2prime-Fluoro nucleosides
  modified_base order(1..3,14..16): mod_base = OTHER; note = Phosphorothioate linkage
tcattaaagtacaaaa

SEQ ID NO: 343 - RNA, 16 nt, synthetic construct
  source 1..16: mol_type = other RNA
  modified_base order(1,2,3,5,7,9,11,12,13,15,16): mod_base = OTHER; note = 2prime-O-methyl nucleosides
  modified_base order(4,6,8,10,14): mod_base = OTHER; note = 2prime-Fluoro nucleosides
  modified_base order(1..3,14..16): mod_base = OTHER; note = Phosphorothioate linkage
gcagattcaatagtga

SEQ ID NO: 344 - RNA, 16 nt, synthetic construct
  source 1..16: mol_type = other RNA
  modified_base order(1,2,3,5,7,9,11,12,13,15,16): mod_base = OTHER; note = 2prime-O-methyl nucleosides
  modified_base order(4,6,8,10,14): mod_base = OTHER; note = 2prime-Fluoro nucleosides
  modified_base order(1..3,14..16): mod_base = OTHER; note = Phosphorothioate linkage
agattcaatagtggta

SEQ ID NO: 345 - RNA, 16 nt, synthetic construct
  source 1..16: mol_type = other RNA
  modified_base order(1,2,3,5,7,9,11,12,13,15,16): mod_base = OTHER; note = 2prime-O-methyl nucleosides
  modified_base order(4,6,8,10,14): mod_base = OTHER; note = 2prime-Fluoro nucleosides
  modified_base order(1..3,14..16): mod_base = OTHER; note = Phosphorothioate linkage
ttaagattagaaggta

SEQ ID NO: 346 - RNA, 16 nt, synthetic construct
  source 1..16: mol_type = other RNA
  modified_base order(1,2,3,5,7,9,11,12,13,15,16): mod_base = OTHER; note = 2prime-O-methyl nucleosides
  modified_base order(4,6,8,10,14): mod_base = OTHER; note = 2prime-Fluoro nucleosides
  modified_base order(1..3,14..16): mod_base = OTHER; note = Phosphorothioate linkage
agattagaaggttata

SEQ ID NO: 347 - RNA, 16 nt, synthetic construct
  source 1..16: mol_type = other RNA
  modified_base order(1,2,3,5,7,9,11,12,13,15,16): mod_base = OTHER; note = 2prime-O-methyl nucleosides
  modified_base order(4,6,8,10,14): mod_base = OTHER; note = 2prime-Fluoro nucleosides
  modified_base order(1..3,14..16): mod_base = OTHER; note = Phosphorothioate linkage
attagaaggttatata

SEQ ID NO: 348 - RNA, 16 nt, synthetic construct
  source 1..16: mol_type = other RNA
  modified_base order(1,2,3,5,7,9,11,12,13,15,16): mod_base = OTHER; note = 2prime-O-methyl nucleosides
  modified_base order(4,6,8,10,14): mod_base = OTHER; note = 2prime-Fluoro nucleosides
  modified_base order(1..3,14..16): mod_base = OTHER; note = Phosphorothioate linkage
ttatattacaatcaaa

SEQ ID NO: 349 - RNA, 16 nt, synthetic construct
  source 1..16: mol_type = other RNA
  modified_base order(1,2,3,5,7,9,11,12,13,15,16): mod_base = OTHER; note = 2prime-O-methyl nucleosides
  modified_base order(4,6,8,10,14): mod_base = OTHER; note = 2prime-Fluoro nucleosides
  modified_base order(1..3,14..16): mod_base = OTHER; note = Phosphorothioate linkage
atattacaatcaatta

SEQ ID NO: 350 - RNA, 16 nt, synthetic construct
  source 1..16: mol_type = other RNA
  modified_base order(1,2,3,5,7,9,11,12,13,15,16): mod_base = OTHER; note = 2prime-O-methyl nucleosides
  modified_base order(4,6,8,10,14): mod_base = OTHER; note = 2prime-Fluoro nucleosides
  modified_base order(1..3,14..16): mod_base = OTHER; note = Phosphorothioate linkage
attacaatcaatttaa

SEQ ID NO: 351 - RNA, 16 nt, synthetic construct
  source 1..16: mol_type = other RNA
  modified_base order(1,2,3,5,7,9,11,12,13,15,16): mod_base = OTHER; note = 2prime-O-methyl nucleosides
  modified_base order(4,6,8,10,14): mod_base = OTHER; note = 2prime-Fluoro nucleosides
  modified_base order(1..3,14..16): mod_base = OTHER; note = Phosphorothioate linkage
acaatcaatttatgta

SEQ ID NO: 352 - RNA, 16 nt, synthetic construct
  source 1..16: mol_type = other RNA
  modified_base order(1,2,3,5,7,9,11,12,13,15,16): mod_base = OTHER; note = 2prime-O-methyl nucleosides
  modified_base order(4,6,8,10,14): mod_base = OTHER; note = 2prime-Fluoro nucleosides
  modified_base order(1..3,14..16): mod_base = OTHER; note = Phosphorothioate linkage
caatcaatttatgtaa

SEQ ID NO: 353 - RNA, 16 nt, synthetic construct
  source 1..16: mol_type = other RNA
  modified_base order(1,2,3,5,7,9,11,12,13,15,16): mod_base = OTHER; note = 2prime-O-methyl nucleosides
  modified_base order(4,6,8,10,14): mod_base = OTHER; note = 2prime-Fluoro nucleosides
  modified_base order(1..3,14..16): mod_base = OTHER; note = Phosphorothioate linkage
cattatcaacattcaa

SEQ ID NO: 354 - RNA, 16 nt, synthetic construct
  source 1..16: mol_type = other RNA
  modified_base order(1,2,3,5,7,9,11,12,13,15,16): mod_base = OTHER; note = 2prime-O-methyl nucleosides
  modified_base order(4,6,8,10,14): mod_base = OTHER; note = 2prime-Fluoro nucleosides
  modified_base order(1..3,14..16): mod_base = OTHER; note = Phosphorothioate linkage
aaacataccaacatga

SEQ ID NO: 355 - RNA, 16 nt, synthetic construct
  source 1..16: mol_type = other RNA
  modified_base order(1,2,3,5,7,9,11,12,13,15,16): mod_base = OTHER; note = 2prime-O-methyl nucleosides
  modified_base order(4,6,8,10,14): mod_base = OTHER; note = 2prime-Fluoro nucleosides
  modified_base order(1..3,14..16): mod_base = OTHER; note = Phosphorothioate linkage
acataccaacatgtaa

SEQ ID NO: 356 - RNA, 16 nt, synthetic construct
  source 1..16: mol_type = other RNA
  modified_base order(1,2,3,5,7,9,11,12,13,15,16): mod_base = OTHER; note = 2prime-O-methyl nucleosides
  modified_base order(4,6,8,10,14): mod_base = OTHER; note = 2prime-Fluoro nucleosides
  modified_base order(1..3,14..16): mod_base = OTHER; note = Phosphorothioate linkage
acatgtatctaaagaa

SEQ ID NO: 357 - RNA, 16 nt, synthetic construct
  source 1..16: mol_type = other RNA
  modified_base order(1,2,3,5,7,9,11,12,13,15,16): mod_base = OTHER; note = 2prime-O-methyl nucleosides
  modified_base order(4,6,8,10,14): mod_base = OTHER; note = 2prime-Fluoro nucleosides
  modified_base order(1..3,14..16): mod_base = OTHER; note = Phosphorothioate linkage
caaatatggtatctca

SEQ ID NO: 358 - RNA, 16 nt, synthetic construct
  source 1..16: mol_type = other RNA
  modified_base order(1,2,3,5,7,9,11,12,13,15,16): mod_base = OTHER; note = 2prime-O-methyl nucleosides
  modified_base order(4,6,8,10,14): mod_base = OTHER; note = 2prime-Fluoro nucleosides
  modified_base order(1..3,14..16): mod_base = OTHER; note = Phosphorothioate linkage
gtatctcaataacaga

SEQ ID NO: 359 - RNA, 16 nt, synthetic construct
  source 1..16: mol_type = other RNA
  modified_base order(1,2,3,5,7,9,11,12,13,15,16): mod_base = OTHER; note = 2prime-O-methyl nucleosides
  modified_base order(4,6,8,10,14): mod_base = OTHER; note = 2prime-Fluoro nucleosides
  modified_base order(1..3,14..16): mod_base = OTHER; note = Phosphorothioate linkage
tcaataacagctacta

SEQ ID NO: 360 - RNA, 16 nt, synthetic construct
  source 1..16: mol_type = other RNA
  modified_base order(1,2,3,5,7,9,11,12,13,15,16): mod_base = OTHER; note = 2prime-O-methyl nucleosides
  modified_base order(4,6,8,10,14): mod_base = OTHER; note = 2prime-Fluoro nucleosides
  modified_base order(1..3,14..16): mod_base = OTHER; note = Phosphorothioate linkage
caataacagctactta

SEQ ID NO: 361 - RNA, 16 nt, synthetic construct
  source 1..16: mol_type = other RNA
  modified_base order(1,2,3,5,7,9,11,12,13,15,16): mod_base = OTHER; note = 2prime-O-methyl nucleosides
  modified_base order(4,6,8,10,14): mod_base = OTHER; note = 2prime-Fluoro nucleosides
  modified_base order(1..3,14..16): mod_base = OTHER; note = Phosphorothioate linkage
aataacagctacttta

SEQ ID NO: 362 - RNA, 16 nt, synthetic construct
  source 1..16: mol_type = other RNA
  modified_base order(1,2,3,5,7,9,11,12,13,15,16): mod_base = OTHER; note = 2prime-O-methyl nucleosides
  modified_base order(4,6,8,10,14): mod_base = OTHER; note = 2prime-Fluoro nucleosides
  modified_base order(1..3,14..16): mod_base = OTHER; note = Phosphorothioate linkage
taatttgacaatgaaa

SEQ ID NO: 363 - RNA, 16 nt, synthetic construct
  source 1..16: mol_type = other RNA
  modified_base order(1,2,3,5,7,9,11,12,13,15,16): mod_base = OTHER; note = 2prime-O-methyl nucleosides
  modified_base order(4,6,8,10,14): mod_base = OTHER; note = 2prime-Fluoro nucleosides
  modified_base order(1..3,14..16): mod_base = OTHER; note = Phosphorothioate linkage
acaatgaatacattta

SEQ ID NO: 364 - RNA, 16 nt, synthetic construct
  source 1..16: mol_type = other RNA
  modified_base order(1,2,3,5,7,9,11,12,13,15,16): mod_base = OTHER; note = 2prime-O-methyl nucleosides
  modified_base order(4,6,8,10,14): mod_base = OTHER; note = 2prime-Fluoro nucleosides
  modified_base order(1..3,14..16): mod_base = OTHER; note = Phosphorothioate linkage
caatgaatacatttca

SEQ ID NO: 365 - RNA, 16 nt, synthetic construct
  source 1..16: mol_type = other RNA
  modified_base order(1,2,3,5,7,9,11,12,13,15,16): mod_base = OTHER; note = 2prime-O-methyl nucleosides
  modified_base order(4,6,8,10,14): mod_base = OTHER; note = 2prime-Fluoro nucleosides
  modified_base order(1..3,14..16): mod_base = OTHER; note = Phosphorothioate linkage
aatgaatacatttcta

SEQ ID NO: 366 - RNA, 16 nt, synthetic construct
  source 1..16: mol_type = other RNA
  modified_base order(1,2,3,5,7,9,11,12,13,15,16): mod_base = OTHER; note = 2prime-O-methyl nucleosides
  modified_base order(4,6,8,10,14): mod_base = OTHER; note = 2prime-Fluoro nucleosides
  modified_base order(1..3,14..16): mod_base = OTHER; note = Phosphorothioate linkage
ataaattggaacttta

SEQ ID NO: 367 - RNA, 16 nt, synthetic construct
  source 1..16: mol_type = other RNA
  modified_base order(1,2,3,5,7,9,11,12,13,15,16): mod_base = OTHER; note = 2prime-O-methyl nucleosides
  modified_base order(4,6,8,10,14): mod_base = OTHER; note = 2prime-Fluoro nucleosides
  modified_base order(1..3,14..16): mod_base = OTHER; note = Phosphorothioate linkage
taaattggaactttga

SEQ ID NO: 368 - RNA, 16 nt, synthetic construct
  source 1..16: mol_type = other RNA
  modified_base order(1,2,3,5,7,9,11,12,13,15,16): mod_base = OTHER; note = 2prime-O-methyl nucleosides
  modified_base order(4,6,8,10,14): mod_base = OTHER; note = 2prime-Fluoro nucleosides
  modified_base order(1..3,14..16): mod_base = OTHER; note = Phosphorothioate linkage
aaattggaactttgta

SEQ ID NO: 369 - RNA, 16 nt, synthetic construct
  source 1..16: mol_type = other RNA
  modified_base order(1,2,3,5,7,9,11,12,13,15,16): mod_base = OTHER; note = 2prime-O-methyl nucleosides
  modified_base order(4,6,8,10,14): mod_base = OTHER; note = 2prime-Fluoro nucleosides
  modified_base order(1..3,14..16): mod_base = OTHER; note = Phosphorothioate linkage
actttgtttatcaaaa

SEQ ID NO: 370 - RNA, 16 nt, synthetic construct
  source 1..16: mol_type = other RNA
  modified_base order(1,2,3,5,7,9,11,12,13,15,16): mod_base = OTHER; note = 2prime-O-methyl nucleosides
  modified_base order(4,6,8,10,14): mod_base = OTHER; note = 2prime-Fluoro nucleosides
  modified_base order(1..3,14..16): mod_base = OTHER; note = Phosphorothioate linkage
tcatagctaaatgaaa

SEQ ID NO: 371 - RNA, 16 nt, synthetic construct
  source 1..16: mol_type = other RNA
  modified_base order(1,2,3,5,7,9,11,12,13,15,16): mod_base = OTHER; note = 2prime-O-methyl nucleosides
  modified_base order(4,6,8,10,14): mod_base = OTHER; note = 2prime-Fluoro nucleosides
  modified_base order(1..3,14..16): mod_base = OTHER; note = Phosphorothioate linkage
ctaaatgaaattatta

SEQ ID NO: 372 - RNA, 16 nt, synthetic construct
  source 1..16: mol_type = other RNA
  modified_base order(1,2,3,5,7,9,11,12,13,15,16): mod_base = OTHER; note = 2prime-O-methyl nucleosides
  modified_base order(4,6,8,10,14): mod_base = OTHER; note = 2prime-Fluoro nucleosides
  modified_base order(1..3,14..16): mod_base = OTHER; note = Phosphorothioate linkage
aaatgaaattatttca

SEQ ID NO: 373 - RNA, 21 nt, synthetic construct
  source 1..21: mol_type = other RNA
  modified_base order(1,3,7,9,11,13,15,17,18,19,20): mod_base = OTHER; note = 2prime-O-methyl nucleosides
  modified_base order(2,4,5,6,8,10,12,14,16,21): mod_base = OTHER; note = 2prime-Fluoro nucleosides
  modified_base order(1..3,14..21): mod_base = OTHER; note = Phosphorothioate linkage
  modified_base 1: mod_base = OTHER; note = 5prime-(E)-Vinylphosphonate
tcttgttcttatttcttcttt

SEQ ID NO: 374 - RNA, 21 nt, synthetic construct
  source 1..21: mol_type = other RNA
  modified_base order(1,3,7,9,11,13,15,17,18,19,20): mod_base = OTHER; note = 2prime-O-methyl nucleosides
  modified_base order(2,4,5,6,8,10,12,14,16,21): mod_base = OTHER; note = 2prime-Fluoro nucleosides
  modified_base order(1..3,14..21): mod_base = OTHER; note = Phosphorothioate linkage
  modified_base 1: mod_base = OTHER; note = 5prime-(E)-Vinylphosphonate
tcacgcacatgcattacactt

SEQ ID NO: 375 - RNA, 21 nt, synthetic construct
  source 1..21: mol_type = other RNA
  modified_base order(1,3,7,9,11,13,15,17,18,19,20): mod_base = OTHER; note = 2prime-O-methyl nucleosides
  modified_base order(2,4,5,6,8,10,12,14,16,21): mod_base = OTHER; note = 2prime-Fluoro nucleosides
  modified_base order(1..3,14..21): mod_base = OTHER; note = Phosphorothioate linkage
  modified_base 1: mod_base = OTHER; note = 5prime-(E)-Vinylphosphonate
ttggcttctattctggagttt

SEQ ID NO: 376 - RNA, 21 nt, synthetic construct
  source 1..21: mol_type = other RNA
  modified_base order(1,3,7,9,11,13,15,17,18,19,20): mod_base = OTHER; note = 2prime-O-methyl nucleosides
  modified_base order(2,4,5,6,8,10,12,14,16,21): mod_base = OTHER; note = 2prime-Fluoro nucleosides
  modified_base order(1..3,14..21): mod_base = OTHER; note = Phosphorothioate linkage
  modified_base 1: mod_base = OTHER; note = 5prime-(E)-Vinylphosphonate
taacatttgggcttgccattt

SEQ ID NO: 377 - RNA, 21 nt, synthetic construct
  source 1..21: mol_type = other RNA
  modified_base order(1,3,7,9,11,13,15,17,18,19,20): mod_base = OTHER; note = 2prime-O-methyl nucleosides
  modified_base order(2,4,5,6,8,10,12,14,16,21): mod_base = OTHER; note = 2prime-Fluoro nucleosides
  modified_base order(1..3,14..21): mod_base = OTHER; note = Phosphorothioate linkage
  modified_base 1: mod_base = OTHER; note = 5prime-(E)-Vinylphosphonate
tcaacatttgggcttgccatt

SEQ ID NO: 378 - RNA, 21 nt, synthetic construct
  source 1..21: mol_type = other RNA
  modified_base order(1,3,7,9,11,13,15,17,18,19,20): mod_base = OTHER; note = 2prime-O-methyl nucleosides
  modified_base order(2,4,5,6,8,10,12,14,16,21): mod_base = OTHER; note = 2prime-Fluoro nucleosides
  modified_base order(1..3,14..21): mod_base = OTHER; note = Phosphorothioate linkage
  modified_base 1: mod_base = OTHER; note = 5prime-(E)-Vinylphosphonate
tcactgttgtaggagtctttt

SEQ ID NO: 379 - RNA, 21 nt, synthetic construct
  source 1..21: mol_type = other RNA
  modified_base order(1,3,7,9,11,13,15,17,18,19,20): mod_base = OTHER; note = 2prime-O-methyl nucleosides
  modified_base order(2,4,5,6,8,10,12,14,16,21): mod_base = OTHER; note = 2prime-Fluoro nucleosides
  modified_base order(1..3,14..21): mod_base = OTHER; note = Phosphorothioate linkage
  modified_base 1: mod_base = OTHER; note = 5prime-(E)-Vinylphosphonate
ttaagttggattcaggctgtt

SEQ ID NO: 380-399 - skipped (20 entries)

SEQ ID NO: 400 - RNA, 21 nt, synthetic construct
  source 1..21: mol_type = other RNA
  modified_base order(1,3,7,9,11,13,15,17,18,19,20): mod_base = OTHER; note = 2prime-O-methyl nucleosides
  modified_base order(2,4,5,6,8,10,12,14,16,21): mod_base = OTHER; note = 2prime-Fluoro nucleosides
  modified_base order(1..3,14..21): mod_base = OTHER; note = Phosphorothioate linkage
  modified_base 1: mod_base = OTHER; note = 5prime-(E)-Vinylphosphonate
tataatccagtcccatccatt

SEQ ID NO: 401 - RNA, 21 nt, synthetic construct
  source 1..21: mol_type = other RNA
  modified_base order(1,3,7,9,11,13,15,17,18,19,20): mod_base = OTHER; note = 2prime-O-methyl nucleosides
  modified_base order(2,4,5,6,8,10,12,14,16,21): mod_base = OTHER; note = 2prime-Fluoro nucleosides
  modified_base order(1..3,14..21): mod_base = OTHER; note = Phosphorothioate linkage
  modified_base 1: mod_base = OTHER; note = 5prime-(E)-Vinylphosphonate
tcacactctcctgagcagttt

SEQ ID NO: 402 - RNA, 21 nt, synthetic construct
  source 1..21: mol_type = other RNA
  modified_base order(1,3,7,9,11,13,15,17,18,19,20): mod_base = OTHER; note = 2prime-O-methyl nucleosides
  modified_base order(2,4,5,6,8,10,12,14,16,21): mod_base = OTHER; note = 2prime-Fluoro nucleosides
  modified_base order(1..3,14..21): mod_base = OTHER; note = Phosphorothioate linkage
  modified_base 1: mod_base = OTHER; note = 5prime-(E)-Vinylphosphonate
tcaaattcacactctcctgtt

SEQ ID NO: 403 - RNA, 21 nt, synthetic construct
  source 1..21: mol_type = other RNA
  modified_base order(1,3,7,9,11,13,15,17,18,19,20): mod_base = OTHER; note = 2prime-O-methyl nucleosides
  modified_base order(2,4,5,6,8,10,12,14,16,21): mod_base = OTHER; note = 2prime-Fluoro nucleosides
  modified_base order(1..3,14..21): mod_base = OTHER; note = Phosphorothioate linkage
  modified_base 1: mod_base = OTHER; note = 5prime-(E)-Vinylphosphonate
tacaaattcacactctccttt

SEQ ID NO: 404 - RNA, 21 nt, synthetic construct
  source 1..21: mol_type = other RNA
  modified_base order(1,3,7,9,11,13,15,17,18,19,20): mod_base = OTHER; note = 2prime-O-methyl nucleosides
  modified_base order(2,4,5,6,8,10,12,14,16,21): mod_base = OTHER; note = 2prime-Fluoro nucleosides
  modified_base order(1..3,14..21): mod_base = OTHER; note = Phosphorothioate linkage
  modified_base 1: mod_base = OTHER; note = 5prime-(E)-Vinylphosphonate
taatatagcatattaatggtt

SEQ ID NO: 405 - RNA, 21 nt, synthetic construct
  source 1..21: mol_type = other RNA
  modified_base order(1,3,7,9,11,13,15,17,18,19,20): mod_base = OTHER; note = 2prime-O-methyl nucleosides
  modified_base order(2,4,5,6,8,10,12,14,16,21): mod_base = OTHER; note = 2prime-Fluoro nucleosides
  modified_base order(1..3,14..21): mod_base = OTHER; note = Phosphorothioate linkage
  modified_base 1: mod_base = OTHER; note = 5prime-(E)-Vinylphosphonate
tttatttgttctttgccattt

SEQ ID NO: 406 - RNA, 21 nt, synthetic construct
  source 1..21: mol_type = other RNA
  modified_base order(1,3,7,9,11,13,15,17,18,19,20): mod_base = OTHER; note = 2prime-O-methyl nucleosides
  modified_base order(2,4,5,6,8,10,12,14,16,21): mod_base = OTHER; note = 2prime-Fluoro nucleosides
  modified_base order(1..3,14..21): mod_base = OTHER; note = Phosphorothioate linkage
  modified_base 1: mod_base = OTHER; note = 5prime-(E)-Vinylphosphonate
tattatttgttctttgccatt

SEQ ID NO: 407 - RNA, 20 nt, synthetic construct
  source 1..20: mol_type = other RNA
  modified_base order(1,3,5,7,9,11,13,15,17,19): mod_base = OTHER; note = 2prime-O-methyl nucleosides
  modified_base order(2,4,6,8,10,12,14,16,18,20): mod_base = OTHER; note = 2prime-Fluoro nucleosides
  modified_base order(1..3,13..20): mod_base = OTHER; note = Phosphorothioate linkage
  modified_base 1: mod_base = OTHER; note = 5prime-(E)-Vinylphosphonate
ttattatttgttctttgcct

SEQ ID NO: 408 - RNA, 21 nt, synthetic construct
  source 1..21: mol_type = other RNA
  modified_base order(1,3,7,9,11,13,15,17,18,19,20): mod_base = OTHER; note = 2prime-O-methyl nucleosides
  modified_base order(2,4,5,6,8,10,12,14,16,21): mod_base = OTHER; note = 2prime-Fluoro nucleosides
  modified_base order(1..3,14..21): mod_base = OTHER; note = Phosphorothioate linkage
  modified_base 1: mod_base = OTHER; note = 5prime-(E)-Vinylphosphonate
taaatttctaacctaatgctt

SEQ ID NO: 409 - RNA, 21 nt, synthetic construct
  source 1..21: mol_type = other RNA
  modified_base order(1,3,7,9,11,13,15,17,18,19,20): mod_base = OTHER; note = 2prime-O-methyl nucleosides
  modified_base order(2,4,5,6,8,10,12,14,16,21): mod_base = OTHER; note = 2prime-Fluoro nucleosides
  modified_base order(1..3,14..21): mod_base = OTHER; note = Phosphorothioate linkage
  modified_base 1: mod_base = OTHER; note = 5prime-(E)-Vinylphosphonate
ttacagcctgtggtgcttgtt

SEQ ID NO: 410 - RNA, 21 nt, synthetic construct
  source 1..21: mol_type = other RNA
  modified_base order(1,3,7,9,11,13,15,17,18,19,20): mod_base = OTHER; note = 2prime-O-methyl nucleosides
  modified_base order(2,4,5,6,8,10,12,14,16,21): mod_base = OTHER; note = 2prime-Fluoro nucleosides
  modified_base order(1..3,14..21): mod_base = OTHER; note = Phosphorothioate linkage
  modified_base 1: mod_base = OTHER; note = 5prime-(E)-Vinylphosphonate
tatacactgtagcttgtgctt

SEQ ID NO: 411 - RNA, 21 nt, synthetic construct
  source 1..21: mol_type = other RNA
  modified_base order(1,3,7,9,11,13,15,17,18,19,20): mod_base = OTHER; note = 2prime-O-methyl nucleosides
  modified_base order(2,4,5,6,8,10,12,14,16,21): mod_base = OTHER; note = 2prime-Fluoro nucleosides
  modified_base order(1..3,14..21): mod_base = OTHER; note = Phosphorothioate linkage
  modified_base 1: mod_base = OTHER; note = 5prime-(E)-Vinylphosphonate
tttggtggttgaatgccaatt

SEQ ID NO: 412 - RNA, 21 nt, synthetic construct
  source 1..21: mol_type = other RNA
  modified_base order(1,3,7,9,11,13,15,17,18,19,20): mod_base = OTHER; note = 2prime-O-methyl nucleosides
  modified_base order(2,4,5,6,8,10,12,14,16,21): mod_base = OTHER; note = 2prime-Fluoro nucleosides
  modified_base order(1..3,14..21): mod_base = OTHER; note = Phosphorothioate linkage
  modified_base 1: mod_base = OTHER; note = 5prime-(E)-Vinylphosphonate
tgaaatcatacaacatccttt

SEQ ID NO: 413 - RNA, 21 nt, synthetic construct
  source 1..21: mol_type = other RNA
  modified_base order(1,3,7,9,11,13,15,17,18,19,20): mod_base = OTHER; note = 2prime-O-methyl nucleosides
  modified_base order(2,4,5,6,8,10,12,14,16,21): mod_base = OTHER; note = 2prime-Fluoro nucleosides
  modified_base order(1..3,14..21): mod_base = OTHER; note = Phosphorothioate linkage
  modified_base 1: mod_base = OTHER; note = 5prime-(E)-Vinylphosphonate
tctctggaaatcatacaactt

SEQ ID NO: 414 - RNA, 21 nt, synthetic construct
  source 1..21: mol_type = other RNA
  modified_base order(1,3,7,9,11,13,15,17,18,19,20): mod_base = OTHER; note = 2prime-O-methyl nucleosides
  modified_base order(2,4,5,6,8,10,12,14,16,21): mod_base = OTHER; note = 2prime-Fluoro nucleosides
  modified_base order(1..3,14..21): mod_base = OTHER; note = Phosphorothioate linkage
  modified_base 1: mod_base = OTHER; note = 5prime-(E)-Vinylphosphonate
taatgtaatttgatctccatt

SEQ ID NO: 415 - RNA, 21 nt, synthetic construct
  source 1..21: mol_type = other RNA
  modified_base order(1,3,7,9,11,13,15,17,18,19,20): mod_base = OTHER; note = 2prime-O-methyl nucleosides
  modified_base order(2,4,5,6,8,10,12,14,16,21): mod_base = OTHER; note = 2prime-Fluoro nucleosides
  modified_base order(1..3,14..21): mod_base = OTHER; note = Phosphorothioate linkage
  modified_base 1: mod_base = OTHER; note = 5prime-(E)-Vinylphosphonate
tcataaatgtaatttgatctt

SEQ ID NO: 416 - RNA, 21 nt, synthetic construct
  source 1..21: mol_type = other RNA
  modified_base order(1,3,7,9,11,13,15,17,18,19,20): mod_base = OTHER; note = 2prime-O-methyl nucleosides
  modified_base order(2,4,5,6,8,10,12,14,16,21): mod_base = OTHER; note = 2prime-Fluoro nucleosides
  modified_base order(1..3,14..21): mod_base = OTHER; note = Phosphorothioate linkage
  modified_base 1: mod_base = OTHER; note = 5prime-(E)-Vinylphosphonate
tactgttaggaaataagactt

SEQ ID NO: 417 - RNA, 21 nt, synthetic construct
  source 1..21: mol_type = other RNA
  modified_base order(1,3,7,9,11,13,15,17,18,19,20): mod_base = OTHER; note = 2prime-O-methyl nucleosides
  modified_base order(2,4,5,6,8,10,12,14,16,21): mod_base = OTHER; note = 2prime-Fluoro nucleosides
  modified_base order(1..3,14..21): mod_base = OTHER; note = Phosphorothioate linkage
  modified_base 1: mod_base = OTHER; note = 5prime-(E)-Vinylphosphonate
taaactgttaggaaataagtt

SEQ ID NO: 418 - RNA, 21 nt, synthetic construct
  source 1..21: mol_type = other RNA
  modified_base order(1,3,7,9,11,13,15,17,18,19,20): mod_base = OTHER; note = 2prime-O-methyl nucleosides
  modified_base order(2,4,5,6,8,10,12,14,16,21): mod_base = OTHER; note = 2prime-Fluoro nucleosides
  modified_base order(1..3,14..21): mod_base = OTHER; note = Phosphorothioate linkage
  modified_base 1: mod_base = OTHER; note = 5prime-(E)-Vinylphosphonate
tgaaactgttaggaaataatt

SEQ ID NO: 419 - RNA, 21 nt, synthetic construct
  source 1..21: mol_type = other RNA
  modified_base order(1,3,7,9,11,13,15,17,18,19,20): mod_base = OTHER; note = 2prime-O-methyl nucleosides
  modified_base order(2,4,5,6,8,10,12,14,16,21): mod_base = OTHER; note = 2prime-Fluoro nucleosides
  modified_base order(1..3,14..21): mod_base = OTHER; note = Phosphorothioate linkage
  modified_base 1: mod_base = OTHER; note = 5prime-(E)-Vinylphosphonate
tacatatagattcttccgttt

SEQ ID NO: 420 - RNA, 21 nt, synthetic construct
  source 1..21: mol_type = other RNA
  modified_base order(1,3,7,9,11,13,15,17,18,19,20): mod_base = OTHER; note = 2prime-O-methyl nucleosides
  modified_base order(2,4,5,6,8,10,12,14,16,21): mod_base = OTHER; note = 2prime-Fluoro nucleosides
  modified_base order(1..3,14..21): mod_base = OTHER; note = Phosphorothioate linkage
  modified_base 1: mod_base = OTHER; note = 5prime-(E)-Vinylphosphonate
ttacatatagattcttccgtt

SEQ ID NO: 421 - RNA, 21 nt, synthetic construct
  source 1..21: mol_type = other RNA
  modified_base order(1,3,7,9,11,13,15,17,18,19,20): mod_base = OTHER; note = 2prime-O-methyl nucleosides
  modified_base order(2,4,5,6,8,10,12,14,16,21): mod_base = OTHER; note = 2prime-Fluoro nucleosides
  modified_base order(1..3,14..21): mod_base = OTHER; note = Phosphorothioate linkage
  modified_base 1: mod_base = OTHER; note = 5prime-(E)-Vinylphosphonate
tgctacatatagattcttctt

SEQ ID NO: 422 - RNA, 21 nt, synthetic construct
  source 1..21: mol_type = other RNA
  modified_base order(1,3,7,9,11,13,15,17,18,19,20): mod_base = OTHER; note = 2prime-O-methyl nucleosides
  modified_base order(2,4,5,6,8,10,12,14,16,21): mod_base = OTHER; note = 2prime-Fluoro nucleosides
  modified_base order(1..3,14..21): mod_base = OTHER; note = Phosphorothioate linkage
  modified_base 1: mod_base = OTHER; note = 5prime-(E)-Vinylphosphonate
tacaatcctacactttacatt

SEQ ID NO: 423 - RNA, 21 nt, synthetic construct
  source 1..21: mol_type = other RNA
  modified_base order(1,3,7,9,11,13,15,17,18,19,20): mod_base = OTHER; note = 2prime-O-methyl nucleosides
  modified_base order(2,4,5,6,8,10,12,14,16,21): mod_base = OTHER; note = 2prime-Fluoro nucleosides
  modified_base order(1..3,14..21): mod_base = OTHER; note = Phosphorothioate linkage
  modified_base 1: mod_base = OTHER; note = 5prime-(E)-Vinylphosphonate
taacaatcctacactttactt

SEQ ID NO: 424 - RNA, 21 nt, synthetic construct
  source 1..21: mol_type = other RNA
  modified_base order(1,3,7,9,11,13,15,17,18,19,20): mod_base = OTHER; note = 2prime-O-methyl nucleosides
  modified_base order(2,4,5,6,8,10,12,14,16,21): mod_base = OTHER; note = 2prime-Fluoro nucleosides
  modified_base order(1..3,14..21): mod_base = OTHER; note = Phosphorothioate linkage
  modified_base 1: mod_base = OTHER; note = 5prime-(E)-Vinylphosphonate
tacaaatataagtgtacattt

SEQ ID NO: 425 - RNA, 21 nt, synthetic construct
  source 1..21: mol_type = other RNA
  modified_base order(1,3,7,9,11,13,15,17,18,19,20): mod_base = OTHER; note = 2prime-O-methyl nucleosides
  modified_base order(2,4,5,6,8,10,12,14,16,21): mod_base = OTHER; note = 2prime-Fluoro nucleosides
  modified_base order(1..3,14..21): mod_base = OTHER; note = Phosphorothioate linkage
  modified_base 1: mod_base = OTHER; note = 5prime-(E)-Vinylphosphonate
tacaatacaaatataagtgtt

SEQ ID NO: 426 - RNA, 21 nt, synthetic construct
  source 1..21: mol_type = other RNA
  modified_base order(1,3,7,9,11,13,15,17,18,19,20): mod_base = OTHER; note = 2prime-O-methyl nucleosides
  modified_base order(2,4,5,6,8,10,12,14,16,21): mod_base = OTHER; note = 2prime-Fluoro nucleosides
  modified_base order(1..3,14..21): mod_base = OTHER; note = Phosphorothioate linkage
  modified_base 1: mod_base = OTHER; note = 5prime-(E)-Vinylphosphonate
tccaagtatacaatacaaatt

SEQ ID NO: 427 - RNA, 21 nt, synthetic construct
  source 1..21: mol_type = other RNA
  modified_base order(1,3,7,9,11,13,15,17,18,19,20): mod_base = OTHER; note = 2prime-O-methyl nucleosides
  modified_base order(2,4,5,6,8,10,12,14,16,21): mod_base = OTHER; note = 2prime-Fluoro nucleosides
  modified_base order(1..3,14..21): mod_base = OTHER; note = Phosphorothioate linkage
  modified_base 1: mod_base = OTHER; note = 5prime-(E)-Vinylphosphonate
taccaagtatacaatacaatt

SEQ ID NO: 428 - RNA, 21 nt, synthetic construct
  source 1..21: mol_type = other RNA
  modified_base order(1,3,7,9,11,13,15,17,18,19,20): mod_base = OTHER; note = 2prime-O-methyl nucleosides
  modified_base order(2,4,5,6,8,10,12,14,16,21): mod_base = OTHER; note = 2prime-Fluoro nucleosides
  modified_base order(1..3,14..21): mod_base = OTHER; note = Phosphorothioate linkage
  modified_base 1: mod_base = OTHER; note = 5prime-(E)-Vinylphosphonate
tccattcctactttgtggatt

SEQ ID NO: 429 - RNA, 21 nt, synthetic construct
  source 1..21: mol_type = other RNA
  modified_base order(1,3,7,9,11,13,15,17,18,19,20): mod_base = OTHER; note = 2prime-O-methyl nucleosides
  modified_base order(2,4,5,6,8,10,12,14,16,21): mod_base = OTHER; note = 2prime-Fluoro nucleosides
  modified_base order(1..3,14..21): mod_base = OTHER; note = Phosphorothioate linkage
  modified_base 1: mod_base = OTHER; note = 5prime-(E)-Vinylphosphonate
taagattcttctttccttatt

SEQ ID NO: 430 - RNA, 21 nt, synthetic construct
  source 1..21: mol_type = other RNA
  modified_base order(1,3,7,9,11,13,15,17,18,19,20): mod_base = OTHER; note = 2prime-O-methyl nucleosides
  modified_base order(2,4,5,6,8,10,12,14,16,21): mod_base = OTHER; note = 2prime-Fluoro nucleosides
  modified_base order(1..3,14..21): mod_base = OTHER; note = Phosphorothioate linkage
  modified_base 1: mod_base = OTHER; note = 5prime-(E)-Vinylphosphonate
taatactgtttggctgccttt

SEQ ID NO: 431 - RNA, 21 nt, synthetic construct
  source 1..21: mol_type = other RNA
  modified_base order(1,3,7,9,11,13,15,17,18,19,20): mod_base = OTHER; note = 2prime-O-methyl nucleosides
  modified_base order(2,4,5,6,8,10,12,14,16,21): mod_base = OTHER; note = 2prime-Fluoro nucleosides
  modified_base order(1..3,14..21): mod_base = OTHER; note = Phosphorothioate linkage
  modified_base 1: mod_base = OTHER; note = 5prime-(E)-Vinylphosphonate
tgccatgtgataaaggcagtt

SEQ ID NO: 432 - RNA, 21 nt, synthetic construct
  source 1..21: mol_type = other RNA
  modified_base order(1,3,7,9,11,13,15,17,18,19,20): mod_base = OTHER; note = 2prime-O-methyl nucleosides
  modified_base order(2,4,5,6,8,10,12,14,16,21): mod_base = OTHER; note = 2prime-Fluoro nucleosides
  modified_base order(1..3,14..21): mod_base = OTHER; note = Phosphorothioate linkage
  modified_base 1: mod_base = OTHER; note = 5prime-(E)-Vinylphosphonate
ttagaaccagtcatttccatt

SEQ ID NO: 433 - RNA, 21 nt, synthetic construct
  source 1..21: mol_type = other RNA
  modified_base order(1,3,7,9,11,13,15,17,18,19,20): mod_base = OTHER; note = 2prime-O-methyl nucleosides
  modified_base order(2,4,5,6,8,10,12,14,16,21): mod_base = OTHER; note = 2prime-Fluoro nucleosides
  modified_base order(1..3,14..21): mod_base = OTHER; note = Phosphorothioate linkage
  modified_base 1: mod_base = OTHER; note = 5prime-(E)-Vinylphosphonate
tgtaattgtttcagagtcttt

SEQ ID NO: 434 - RNA, 21 nt, synthetic construct
  source 1..21: mol_type = other RNA
  modified_base order(1,3,7,9,11,13,15,17,18,19,20): mod_base = OTHER; note = 2prime-O-methyl nucleosides
  modified_base order(2,4,5,6,8,10,12,14,16,21): mod_base = OTHER; note = 2prime-Fluoro nucleosides
  modified_base order(1..3,14..21): mod_base = OTHER; note = Phosphorothioate linkage
  modified_base 1: mod_base = OTHER; note = 5prime-(E)-Vinylphosphonate
ttaaatgtaattgtttcagtt

SEQ ID NO: 435 - RNA, 21 nt, synthetic construct
  source 1..21: mol_type = other RNA
  modified_base order(1,3,7,9,11,13,15,17,18,19,20): mod_base = OTHER; note = 2prime-O-methyl nucleosides
  modified_base order(2,4,5,6,8,10,12,14,16,21): mod_base = OTHER; note = 2prime-Fluoro nucleosides
  modified_base order(1..3,14..21): mod_base = OTHER; note = Phosphorothioate linkage
  modified_base 1: mod_base = OTHER; note = 5prime-(E)-Vinylphosphonate
tataaatgtaattgtttcatt

SEQ ID NO: 436 - RNA, 21 nt, synthetic construct
  source 1..21: mol_type = other RNA
  modified_base order(1,3,7,9,11,13,15,17,18,19,20): mod_base = OTHER; note = 2prime-O-methyl nucleosides
  modified_base order(2,4,5,6,8,10,12,14,16,21): mod_base = OTHER; note = 2prime-Fluoro nucleosides
  modified_base order(1..3,14..21): mod_base = OTHER; note = Phosphorothioate linkage
  modified_base 1: mod_base = OTHER; note = 5prime-(E)-Vinylphosphonate
ttataaatgtaattgtttctt

SEQ ID NO: 437 - RNA, 21 nt, synthetic construct
  source 1..21: mol_type = other RNA
  modified_base order(1,3,7,9,11,13,15,17,18,19,20): mod_base = OTHER; note = 2prime-O-methyl nucleosides
  modified_base order(2,4,5,6,8,10,12,14,16,21): mod_base = OTHER; note = 2prime-Fluoro nucleosides
  modified_base order(1..3,14..21): mod_base = OTHER; note = Phosphorothioate linkage
  modified_base 1: mod_base = OTHER; note = 5prime-(E)-Vinylphosphonate
tatacatattatataaatgtt

SEQ ID NO: 438 - RNA, 21 nt, synthetic construct
  source 1..21: mol_type = other RNA
  modified_base order(1,3,7,9,11,13,15,17,18,19,20): mod_base = OTHER; note = 2prime-O-methyl nucleosides
  modified_base order(2,4,5,6,8,10,12,14,16,21): mod_base = OTHER; note = 2prime-Fluoro nucleosides
  modified_base order(1..3,14..21): mod_base = OTHER; note = Phosphorothioate linkage
  modified_base 1: mod_base = OTHER; note = 5prime-(E)-Vinylphosphonate
taatattgtatacatattatt

SEQ ID NO: 439 - RNA, 21 nt, synthetic construct
  source 1..21: mol_type = other RNA
  modified_base order(1,3,7,9,11,13,15,17,18,19,20): mod_base = OTHER; note = 2prime-O-methyl nucleosides
  modified_base order(2,4,5,6,8,10,12,14,16,21): mod_base = OTHER; note = 2prime-Fluoro nucleosides
  modified_base order(1..3,14..21): mod_base = OTHER; note = Phosphorothioate linkage
  modified_base 1: mod_base = OTHER; note = 5prime-(E)-Vinylphosphonate
tcaatattgtatacatatttt

SEQ ID NO: 440 - RNA, 21 nt, synthetic construct
  source 1..21: mol_type = other RNA
  modified_base order(1,3,7,9,11,13,15,17,18,19,20): mod_base = OTHER; note = 2prime-O-methyl nucleosides
  modified_base order(2,4,5,6,8,10,12,14,16,21): mod_base = OTHER; note = 2prime-Fluoro nucleosides
  modified_base order(1..3,14..21): mod_base = OTHER; note = Phosphorothioate linkage
  modified_base 1: mod_base = OTHER; note = 5prime-(E)-Vinylphosphonate
taaacaatattgtatacattt

SEQ ID NO: 441 - RNA, 21 nt, synthetic construct
  source 1..21: mol_type = other RNA
  modified_base order(1,3,7,9,11,13,15,17,18,19,20): mod_base = OTHER; note = 2prime-O-methyl nucleosides
  modified_base order(2,4,5,6,8,10,12,14,16,21): mod_base = OTHER; note = 2prime-Fluoro nucleosides
  modified_base order(1..3,14..21): mod_base = OTHER; note = Phosphorothioate linkage
  modified_base 1: mod_base = OTHER; note = 5prime-(E)-Vinylphosphonate
tgacacttatttacaaaactt

SEQ ID NO: 442 - RNA, 21 nt, synthetic construct
  source 1..21: mol_type = other RNA
  modified_base order(1,3,7,9,11,13,15,17,18,19,20): mod_base = OTHER; note = 2prime-O-methyl nucleosides
  modified_base order(2,4,5,6,8,10,12,14,16,21): mod_base = OTHER; note = 2prime-Fluoro nucleosides
  modified_base order(1..3,14..21): mod_base = OTHER; note = Phosphorothioate linkage
  modified_base 1: mod_base = OTHER; note = 5prime-(E)-Vinylphosphonate
tgagacacttatttacaaatt

SEQ ID NO: 443 - RNA, 21 nt, synthetic construct
  source 1..21: mol_type = other RNA
  modified_base order(1,3,7,9,11,13,15,17,18,19,20): mod_base = OTHER; note = 2prime-O-methyl nucleosides
  modified_base order(2,4,5,6,8,10,12,14,16,21): mod_base = OTHER; note = 2prime-Fluoro nucleosides
  modified_base order(1..3,14..21): mod_base = OTHER; note = Phosphorothioate linkage
  modified_base 1: mod_base = OTHER; note = 5prime-(E)-Vinylphosphonate
tggagacacttatttacaatt

SEQ ID NO: 444 - RNA, 21 nt, synthetic construct
  source 1..21: mol_type = other RNA
  modified_base order(1,3,7,9,11,13,15,17,18,19,20): mod_base = OTHER; note = 2prime-O-methyl nucleosides
  modified_base order(2,4,5,6,8,10,12,14,16,21): mod_base = OTHER; note = 2prime-Fluoro nucleosides
  modified_base order(1..3,14..21): mod_base = OTHER; note = Phosphorothioate linkage
  modified_base 1: mod_base = OTHER; note = 5prime-(E)-Vinylphosphonate
taggagacacttatttacatt

SEQ ID NO: 445 - RNA, 21 nt, synthetic construct
  source 1..21: mol_type = other RNA
  modified_base order(1,3,7,9,11,13,15,17,18,19,20): mod_base = OTHER; note = 2prime-O-methyl nucleosides
  modified_base order(2,4,5,6,8,10,12,14,16,21): mod_base = OTHER; note = 2prime-Fluoro nucleosides
  modified_base order(1..3,14..21): mod_base = OTHER; note = Phosphorothioate linkage
  modified_base 1: mod_base = OTHER; note = 5prime-(E)-Vinylphosphonate
taaaggagacacttatttatt

SEQ ID NO: 446 - RNA, 21 nt, synthetic construct
  source 1..21: mol_type = other RNA
  modified_base order(1,3,7,9,11,13,15,17,18,19,20): mod_base = OTHER; note = 2prime-O-methyl nucleosides
  modified_base order(2,4,5,6,8,10,12,14,16,21): mod_base = OTHER; note = 2prime-Fluoro nucleosides
  modified_base order(1..3,14..21): mod_base = OTHER; note = Phosphorothioate linkage
  modified_base 1: mod_base = OTHER; note = 5prime-(E)-Vinylphosphonate
taaatttcattagtgtaaatt

SEQ ID NO: 447 - RNA, 21 nt, synthetic construct
  source 1..21: mol_type = other RNA
  modified_base order(1,3,7,9,11,13,15,17,18,19,20): mod_base = OTHER; note = 2prime-O-methyl nucleosides
  modified_base order(2,4,5,6,8,10,12,14,16,21): mod_base = OTHER; note = 2prime-Fluoro nucleosides
  modified_base order(1..3,14..21): mod_base = OTHER; note = Phosphorothioate linkage
  modified_base 1: mod_base = OTHER; note = 5prime-(E)-Vinylphosphonate
tgaaatttcattagtgtaatt

SEQ ID NO: 448 - RNA, 21 nt, synthetic construct
  source 1..21: mol_type = other RNA
  modified_base order(1,3,7,9,11,13,15,17,18,19,20): mod_base = OTHER; note = 2prime-O-methyl nucleosides
  modified_base order(2,4,5,6,8,10,12,14,16,21): mod_base = OTHER; note = 2prime-Fluoro nucleosides
  modified_base order(1..3,14..21): mod_base = OTHER; note = Phosphorothioate linkage
  modified_base 1: mod_base = OTHER; note = 5prime-(E)-Vinylphosphonate
ttgaaatttcattagtgtatt

SEQ ID NO: 449 - RNA, 21 nt, synthetic construct
  source 1..21: mol_type = other RNA
  modified_base order(1,3,7,9,11,13,15,17,18,19,20): mod_base = OTHER; note = 2prime-O-methyl nucleosides
  modified_base order(2,4,5,6,8,10,12,14,16,21): mod_base = OTHER; note = 2prime-Fluoro nucleosides
  modified_base order(1..3,14..21): mod_base = OTHER; note = Phosphorothioate linkage
  modified_base 1: mod_base = OTHER; note = 5prime-(E)-Vinylphosphonate
taatgatttgaaatttcattt

SEQ ID NO: 450 - RNA, 21 nt, synthetic construct
  source 1..21: mol_type = other RNA
  modified_base order(1,3,7,9,11,13,15,17,18,19,20): mod_base = OTHER; note = 2prime-O-methyl nucleosides
  modified_base order(2,4,5,6,8,10,12,14,16,21): mod_base = OTHER; note = 2prime-Fluoro nucleosides
  modified_base order(1..3,14..21): mod_base = OTHER; note = Phosphorothioate linkage
  modified_base 1: mod_base = OTHER; note = 5prime-(E)-Vinylphosphonate
ttttgtactttaatgattttt

SEQ ID NO: 451 - RNA, 21 nt, synthetic construct
  source 1..21: mol_type = other RNA
  modified_base order(1,3,7,9,11,13,15,17,18,19,20): mod_base = OTHER; note = 2prime-O-methyl nucleosides
  modified_base order(2,4,5,6,8,10,12,14,16,21): mod_base = OTHER; note = 2prime-Fluoro nucleosides
  modified_base order(1..3,14..21): mod_base = OTHER; note = Phosphorothioate linkage
  modified_base 1: mod_base = OTHER; note = 5prime-(E)-Vinylphosphonate
tcactattgaatctgctaatt

SEQ ID NO: 452 - RNA, 21 nt, synthetic construct
  source 1..21: mol_type = other RNA
  modified_base order(1,3,7,9,11,13,15,17,18,19,20): mod_base = OTHER; note = 2prime-O-methyl nucleosides
  modified_base order(2,4,5,6,8,10,12,14,16,21): mod_base = OTHER; note = 2prime-Fluoro nucleosides
  modified_base order(1..3,14..21): mod_base = OTHER; note = Phosphorothioate linkage
  modified_base 1: mod_base = OTHER; note = 5prime-(E)-Vinylphosphonate
taccactattgaatctgcttt

SEQ ID NO: 453 - RNA, 21 nt, synthetic construct
  source 1..21: mol_type = other RNA
  modified_base order(1,3,7,9,11,13,15,17,18,19,20): mod_base = OTHER; note = 2prime-O-methyl nucleosides
  modified_base order(2,4,5,6,8,10,12,14,16,21): mod_base = OTHER; note = 2prime-Fluoro nucleosides
  modified_base order(1..3,14..21): mod_base = OTHER; note = Phosphorothioate linkage
  modified_base 1: mod_base = OTHER; note = 5prime-(E)-Vinylphosphonate
taccttctaatcttaacattt

SEQ ID NO: 454 - RNA, 21 nt, synthetic construct
  source 1..21: mol_type = other RNA
  modified_base order(1,3,7,9,11,13,15,17,18,19,20): mod_base = OTHER; note = 2prime-O-methyl nucleosides
  modified_base order(2,4,5,6,8,10,12,14,16,21): mod_base = OTHER; note = 2prime-Fluoro nucleosides
  modified_base order(1..3,14..21): mod_base = OTHER; note = Phosphorothioate linkage
  modified_base 1: mod_base = OTHER; note = 5prime-(E)-Vinylphosphonate
tataaccttctaatcttaatt

SEQ ID NO: 455 - RNA, 21 nt, synthetic construct
  source 1..21: mol_type = other RNA
  modified_base order(1,3,7,9,11,13,15,17,18,19,20): mod_base = OTHER; note = 2prime-O-methyl nucleosides
  modified_base order(2,4,5,6,8,10,12,14,16,21): mod_base = OTHER; note = 2prime-Fluoro nucleosides
  modified_base order(1..3,14..21): mod_base = OTHER; note = Phosphorothioate linkage
  modified_base 1: mod_base = OTHER; note = 5prime-(E)-Vinylphosphonate
tatataaccttctaatctttt

SEQ ID NO: 456 - RNA, 21 nt, synthetic construct
  source 1..21: mol_type = other RNA
  modified_base order(1,3,7,9,11,13,15,17,18,19,20): mod_base = OTHER; note = 2prime-O-methyl nucleosides
  modified_base order(2,4,5,6,8,10,12,14,16,21): mod_base = OTHER; note = 2prime-Fluoro nucleosides
  modified_base order(1..3,14..21): mod_base = OTHER; note = Phosphorothioate linkage
  modified_base 1: mod_base = OTHER; note = 5prime-(E)-Vinylphosphonate
tttgattgtaatataaccttt

SEQ ID NO: 457 - RNA, 21 nt, synthetic construct
  source 1..21: mol_type = other RNA
  modified_base order(1,3,7,9,11,13,15,17,18,19,20): mod_base = OTHER; note = 2prime-O-methyl nucleosides
  modified_base order(2,4,5,6,8,10,12,14,16,21): mod_base = OTHER; note = 2prime-Fluoro nucleosides
  modified_base order(1..3,14..21): mod_base = OTHER; note = Phosphorothioate linkage
  modified_base 1: mod_base = OTHER; note = 5prime-(E)-Vinylphosphonate
taattgattgtaatataactt

SEQ ID NO: 458 - RNA, 21 nt, synthetic construct
  source 1..21: mol_type = other RNA
  modified_base order(1,3,7,9,11,13,15,17,18,19,20): mod_base = OTHER; note = 2prime-O-methyl nucleosides
  modified_base order(2,4,5,6,8,10,12,14,16,21): mod_base = OTHER; note = 2prime-Fluoro nucleosides
  modified_base order(1..3,14..21): mod_base = OTHER; note = Phosphorothioate linkage
  modified_base 1: mod_base = OTHER; note = 5prime-(E)-Vinylphosphonate
ttaaattgattgtaatatatt

SEQ ID NO: 459 - RNA, 21 nt, synthetic construct
  source 1..21: mol_type = other RNA
  modified_base order(1,3,7,9,11,13,15,17,18,19,20): mod_base = OTHER; note = 2prime-O-methyl nucleosides
  modified_base order(2,4,5,6,8,10,12,14,16,21): mod_base = OTHER; note = 2prime-Fluoro nucleosides
  modified_base order(1..3,14..21): mod_base = OTHER; note = Phosphorothioate linkage
  modified_base 1: mod_base = OTHER; note = 5prime-(E)-Vinylphosphonate
tacataaattgattgtaattt

SEQ ID NO: 460 - RNA, 21 nt, synthetic construct
  source 1..21: mol_type = other RNA
  modified_base order(1,3,7,9,11,13,15,17,18,19,20): mod_base = OTHER; note = 2prime-O-methyl nucleosides
  modified_base order(2,4,5,6,8,10,12,14,16,21): mod_base = OTHER; note = 2prime-Fluoro nucleosides
  modified_base order(1..3,14..21): mod_base = OTHER; note = Phosphorothioate linkage
  modified_base 1: mod_base = OTHER; note = 5prime-(E)-Vinylphosphonate
ttacataaattgattgtaatt

SEQ ID NO: 461 - RNA, 21 nt, synthetic construct
  source 1..21: mol_type = other RNA
  modified_base order(1,3,7,9,11,13,15,17,18,19,20): mod_base = OTHER; note = 2prime-O-methyl nucleosides
  modified_base order(2,4,5,6,8,10,12,14,16,21): mod_base = OTHER; note = 2prime-Fluoro nucleosides
  modified_base order(1..3,14..21): mod_base = OTHER; note = Phosphorothioate linkage
  modified_base 1: mod_base = OTHER; note = 5prime-(E)-Vinylphosphonate
ttgaatgttgataatgtaatt

SEQ ID NO: 462 - RNA, 21 nt, synthetic construct
  source 1..21: mol_type = other RNA
  modified_base order(1,3,7,9,11,13,15,17,18,19,20): mod_base = OTHER; note = 2prime-O-methyl nucleosides
  modified_base order(2,4,5,6,8,10,12,14,16,21): mod_base = OTHER; note = 2prime-Fluoro nucleosides
  modified_base order(1..3,14..21): mod_base = OTHER; note = Phosphorothioate linkage
  modified_base 1: mod_base = OTHER; note = 5prime-(E)-Vinylphosphonate
tcatgttggtatgtttagttt

SEQ ID NO: 463 - RNA, 21 nt, synthetic construct
  source 1..21: mol_type = other RNA
  modified_base order(1,3,7,9,11,13,15,17,18,19,20): mod_base = OTHER; note = 2prime-O-methyl nucleosides
  modified_base order(2,4,5,6,8,10,12,14,16,21): mod_base = OTHER; note = 2prime-Fluoro nucleosides
  modified_base order(1..3,14..21): mod_base = OTHER; note = Phosphorothioate linkage
  modified_base 1: mod_base = OTHER; note = 5prime-(E)-Vinylphosphonate
ttacatgttggtatgtttatt

SEQ ID NO: 464 - RNA, 21 nt, synthetic construct
  source 1..21: mol_type = other RNA
  modified_base order(1,3,7,9,11,13,15,17,18,19,20): mod_base = OTHER; note = 2prime-O-methyl nucleosides
  modified_base order(2,4,5,6,8,10,12,14,16,21): mod_base = OTHER; note = 2prime-Fluoro nucleosides
  modified_base order(1..3,14..21): mod_base = OTHER; note = Phosphorothioate linkage
  modified_base 1: mod_base = OTHER; note = 5prime-(E)-Vinylphosphonate
ttctttagatacatgttggtt

SEQ ID NO: 465 - RNA, 21 nt, synthetic construct
  source 1..21: mol_type = other RNA
  modified_base order(1,3,7,9,11,13,15,17,18,19,20): mod_base = OTHER; note = 2prime-O-methyl nucleosides
  modified_base order(2,4,5,6,8,10,12,14,16,21): mod_base = OTHER; note = 2prime-Fluoro nucleosides
  modified_base order(1..3,14..21): mod_base = OTHER; note = Phosphorothioate linkage
  modified_base 1: mod_base = OTHER; note = 5prime-(E)-Vinylphosphonate
tgagataccatatttgtattt

SEQ ID NO: 466 - RNA, 21 nt, synthetic construct
  source 1..21: mol_type = other RNA
  modified_base order(1,3,7,9,11,13,15,17,18,19,20): mod_base = OTHER; note = 2prime-O-methyl nucleosides
  modified_base order(2,4,5,6,8,10,12,14,16,21): mod_base = OTHER; note = 2prime-Fluoro nucleosides
  modified_base order(1..3,14..21): mod_base = OTHER; note = Phosphorothioate linkage
  modified_base 1: mod_base = OTHER; note = 5prime-(E)-Vinylphosphonate
tctgttattgagataccattt

SEQ ID NO: 467 - RNA, 21 nt, synthetic construct
  source 1..21: mol_type = other RNA
  modified_base order(1,3,7,9,11,13,15,17,18,19,20): mod_base = OTHER; note = 2prime-O-methyl nucleosides
  modified_base order(2,4,5,6,8,10,12,14,16,21): mod_base = OTHER; note = 2prime-Fluoro nucleosides
  modified_base order(1..3,14..21): mod_base = OTHER; note = Phosphorothioate linkage
  modified_base 1: mod_base = OTHER; note = 5prime-(E)-Vinylphosphonate
tagtagctgttattgagattt

SEQ ID NO: 468 - RNA, 21 nt, synthetic construct
  source 1..21: mol_type = other RNA
  modified_base order(1,3,7,9,11,13,15,17,18,19,20): mod_base = OTHER; note = 2prime-O-methyl nucleosides
  modified_base order(2,4,5,6,8,10,12,14,16,21): mod_base = OTHER; note = 2prime-Fluoro nucleosides
  modified_base order(1..3,14..21): mod_base = OTHER; note = Phosphorothioate linkage
  modified_base 1: mod_base = OTHER; note = 5prime-(E)-Vinylphosphonate
taagtagctgttattgagatt

SEQ ID NO: 469 - RNA, 21 nt, synthetic construct
  source 1..21: mol_type = other RNA
  modified_base order(1,3,7,9,11,13,15,17,18,19,20): mod_base = OTHER; note = 2prime-O-methyl nucleosides
  modified_base order(2,4,5,6,8,10,12,14,16,21): mod_base = OTHER; note = 2prime-Fluoro nucleosides
  modified_base order(1..3,14..21): mod_base = OTHER; note = Phosphorothioate linkage
  modified_base 1: mod_base = OTHER; note = 5prime-(E)-Vinylphosphonate
taaagtagctgttattgagtt

SEQ ID NO: 470 - RNA, 21 nt, synthetic construct
  source 1..21: mol_type = other RNA
  modified_base order(1,3,7,9,11,13,15,17,18,19,20): mod_base = OTHER; note = 2prime-O-methyl nucleosides
  modified_base order(2,4,5,6,8,10,12,14,16,21): mod_base = OTHER; note = 2prime-Fluoro nucleosides
  modified_base order(1..3,14..21): mod_base = OTHER; note = Phosphorothioate linkage
  modified_base 1: mod_base = OTHER; note = 5prime-(E)-Vinylphosphonate
tttcattgtcaaattataatt

SEQ ID NO: 471 - RNA, 21 nt, synthetic construct
  source 1..21: mol_type = other RNA
  modified_base order(1,3,7,9,11,13,15,17,18,19,20): mod_base = OTHER; note = 2prime-O-methyl nucleosides
  modified_base order(2,4,5,6,8,10,12,14,16,21): mod_base = OTHER; note = 2prime-Fluoro nucleosides
  modified_base order(1..3,14..21): mod_base = OTHER; note = Phosphorothioate linkage
  modified_base 1: mod_base = OTHER; note = 5prime-(E)-Vinylphosphonate
taaatgtattcattgtcaatt

SEQ ID NO: 472 - RNA, 21 nt, synthetic construct
  source 1..21: mol_type = other RNA
  modified_base order(1,3,7,9,11,13,15,17,18,19,20): mod_base = OTHER; note = 2prime-O-methyl nucleosides
  modified_base order(2,4,5,6,8,10,12,14,16,21): mod_base = OTHER; note = 2prime-Fluoro nucleosides
  modified_base order(1..3,14..21): mod_base = OTHER; note = Phosphorothioate linkage
  modified_base 1: mod_base = OTHER; note = 5prime-(E)-Vinylphosphonate
tgaaatgtattcattgtcatt

SEQ ID NO: 473 - RNA, 21 nt, synthetic construct
  source 1..21: mol_type = other RNA
  modified_base order(1,3,7,9,11,13,15,17,18,19,20): mod_base = OTHER; note = 2prime-O-methyl nucleosides
  modified_base order(2,4,5,6,8,10,12,14,16,21): mod_base = OTHER; note = 2prime-Fluoro nucleosides
  modified_base order(1..3,14..21): mod_base = OTHER; note = Phosphorothioate linkage
  modified_base 1: mod_base = OTHER; note = 5prime-(E)-Vinylphosphonate
tagaaatgtattcattgtctt

SEQ ID NO: 474 - RNA, 21 nt, synthetic construct
  source 1..21: mol_type = other RNA
  modified_base order(1,3,7,9,11,13,15,17,18,19,20): mod_base = OTHER; note = 2prime-O-methyl nucleosides
  modified_base order(2,4,5,6,8,10,12,14,16,21): mod_base = OTHER; note = 2prime-Fluoro nucleosides
  modified_base order(1..3,14..21): mod_base = OTHER; note = Phosphorothioate linkage
  modified_base 1: mod_base = OTHER; note = 5prime-(E)-Vinylphosphonate
taaagttccaatttataaatt

SEQ ID NO: 475 - RNA, 21 nt, synthetic construct
  source 1..21: mol_type = other RNA
  modified_base order(1,3,7,9,11,13,15,17,18,19,20): mod_base = OTHER; note = 2prime-O-methyl nucleosides
  modified_base order(2,4,5,6,8,10,12,14,16,21): mod_base = OTHER; note = 2prime-Fluoro nucleosides
  modified_base order(1..3,14..21): mod_base = OTHER; note = Phosphorothioate linkage
  modified_base 1: mod_base = OTHER; note = 5prime-(E)-Vinylphosphonate
tcaaagttccaatttataatt

SEQ ID NO: 476 - RNA, 21 nt, synthetic construct
  source 1..21: mol_type = other RNA
  modified_base order(1,3,7,9,11,13,15,17,18,19,20): mod_base = OTHER; note = 2prime-O-methyl nucleosides
  modified_base order(2,4,5,6,8,10,12,14,16,21): mod_base = OTHER; note = 2prime-Fluoro nucleosides
  modified_base order(1..3,14..21): mod_base = OTHER; note = Phosphorothioate linkage
  modified_base 1: mod_base = OTHER; note = 5prime-(E)-Vinylphosphonate
tacaaagttccaatttatatt

SEQ ID NO: 477 - RNA, 21 nt, synthetic construct
  source 1..21: mol_type = other RNA
  modified_base order(1,3,7,9,11,13,15,17,18,19,20): mod_base = OTHER; note = 2prime-O-methyl nucleosides
  modified_base order(2,4,5,6,8,10,12,14,16,21): mod_base = OTHER; note = 2prime-Fluoro nucleosides
  modified_base order(1..3,14..21): mod_base = OTHER; note = Phosphorothioate linkage
  modified_base 1: mod_base = OTHER; note = 5prime-(E)-Vinylphosphonate
ttttgataaacaaagttcctt

SEQ ID NO: 478 - RNA, 21 nt, synthetic construct
  source 1..21: mol_type = other RNA
  modified_base order(1,3,7,9,11,13,15,17,18,19,20): mod_base = OTHER; note = 2prime-O-methyl nucleosides
  modified_base order(2,4,5,6,8,10,12,14,16,21): mod_base = OTHER; note = 2prime-Fluoro nucleosides
  modified_base order(1..3,14..21): mod_base = OTHER; note = Phosphorothioate linkage
  modified_base 1: mod_base = OTHER; note = 5prime-(E)-Vinylphosphonate
tttcatttagctatgagtatt

SEQ ID NO: 479 - RNA, 21 nt, synthetic construct
  source 1..21: mol_type = other RNA
  modified_base order(1,3,7,9,11,13,15,17,18,19,20): mod_base = OTHER; note = 2prime-O-methyl nucleosides
  modified_base order(2,4,5,6,8,10,12,14,16,21): mod_base = OTHER; note = 2prime-Fluoro nucleosides
  modified_base order(1..3,14..21): mod_base = OTHER; note = Phosphorothioate linkage
  modified_base 1: mod_base = OTHER; note = 5prime-(E)-Vinylphosphonate
taataatttcatttagctatt

SEQ ID NO: 480 - RNA, 21 nt, synthetic construct
  source 1..21: mol_type = other RNA
  modified_base order(1,3,7,9,11,13,15,17,18,19,20): mod_base = OTHER; note = 2prime-O-methyl nucleosides
  modified_base order(2,4,5,6,8,10,12,14,16,21): mod_base = OTHER; note = 2prime-Fluoro nucleosides
  modified_base order(1..3,14..21): mod_base = OTHER; note = Phosphorothioate linkage
  modified_base 1: mod_base = OTHER; note = 5prime-(E)-Vinylphosphonate
tgaaataatttcatttagctt

SEQ ID NO: 481 - RNA, 16 nt, synthetic construct
  source 1..16: mol_type = other RNA
  modified_base order(1,2,3,5,7,9,11,12,13,15,16): mod_base = OTHER; note = 2prime-O-methyl nucleosides
  modified_base order(4,6,8,10,14): mod_base = OTHER; note = 2prime-Fluoro nucleosides
  modified_base order(1..3,14..16): mod_base = OTHER; note = Phosphorothioate linkage
taatgcatgtacttga

SEQ ID NO: 482 - RNA, 16 nt, synthetic construct
  source 1..16: mol_type = other RNA
  modified_base order(1,2,3,5,7,9,11,12,13,15,16): mod_base = OTHER; note = 2prime-O-methyl nucleosides
  modified_base order(4,6,8,10,14): mod_base = OTHER; note = 2prime-Fluoro nucleosides
  modified_base order(1..3,14..16): mod_base = OTHER; note = Phosphorothioate linkage
gaatagaagccattaa

SEQ ID NO: 483 - RNA, 16 nt, synthetic construct
  source 1..16: mol_type = other RNA
  modified_base order(1,2,3,5,7,9,11,12,13,15,16): mod_base = OTHER; note = 2prime-O-methyl nucleosides
  modified_base order(4,6,8,10,14): mod_base = OTHER; note = 2prime-Fluoro nucleosides
  modified_base order(1..3,14..16): mod_base = OTHER; note = Phosphorothioate linkage
ttaagatacaaatcca

SEQ ID NO: 484 - RNA, 16 nt, synthetic construct
  source 1..16: mol_type = other RNA
  modified_base order(1,2,3,5,7,9,11,12,13,15,16): mod_base = OTHER; note = 2prime-O-methyl nucleosides
  modified_base order(4,6,8,10,14): mod_base = OTHER; note = 2prime-Fluoro nucleosides
  modified_base order(1..3,14..16): mod_base = OTHER; note = Phosphorothioate linkage
tcagcaaagatgttaa

SEQ ID NO: 485 - RNA, 16 nt, synthetic construct
  source 1..16: mol_type = other RNA
  modified_base order(1,2,3,5,7,9,11,12,13,15,16): mod_base = OTHER; note = 2prime-O-methyl nucleosides
  modified_base order(4,6,8,10,14): mod_base = OTHER; note = 2prime-Fluoro nucleosides
  modified_base order(1..3,14..16): mod_base = OTHER; note = Phosphorothioate linkage
gcttctttaaatttaa

SEQ ID NO: 486 - RNA, 16 nt, synthetic construct
  source 1..16: mol_type = other RNA
  modified_base order(1,2,3,5,7,9,11,12,13,15,16): mod_base = OTHER; note = 2prime-O-methyl nucleosides
  modified_base order(4,6,8,10,14): mod_base = OTHER; note = 2prime-Fluoro nucleosides
  modified_base order(1..3,14..16): mod_base = OTHER; note = Phosphorothioate linkage
aaaggcccaactatga

SEQ ID NO: 487 - RNA, 16 nt, synthetic construct
  source 1..16: mol_type = other RNA
  modified_base order(1,2,3,5,7,9,11,12,13,15,16): mod_base = OTHER; note = 2prime-O-methyl nucleosides
  modified_base order(4,6,8,10,14): mod_base = OTHER; note = 2prime-Fluoro nucleosides
  modified_base order(1..3,14..16): mod_base = OTHER; note = Phosphorothioate linkage
actcctacaacagtga

SEQ ID NO: 488 - RNA, 16 nt, synthetic construct
  source 1..16: mol_type = other RNA
  modified_base order(1,2,3,5,7,9,11,12,13,15,16): mod_base = OTHER; note = 2prime-O-methyl nucleosides
  modified_base order(4,6,8,10,14): mod_base = OTHER; note = 2prime-Fluoro nucleosides
  modified_base order(1..3,14..16): mod_base = OTHER; note = Phosphorothioate linkage
ctacaacagtgtttga

SEQ ID NO: 489 - RNA, 16 nt, synthetic construct
  source 1..16: mol_type = other RNA
  modified_base order(1,2,3,5,7,9,11,12,13,15,16): mod_base = OTHER; note = 2prime-O-methyl nucleosides
  modified_base order(4,6,8,10,14): mod_base = OTHER; note = 2prime-Fluoro nucleosides
  modified_base order(1..3,14..16): mod_base = OTHER; note = Phosphorothioate linkage
tgaagacagtgttgca

SEQ ID NO: 490 - RNA, 16 nt, synthetic construct
  source 1..16: mol_type = other RNA
  modified_base order(1,2,3,5,7,9,11,12,13,15,16): mod_base = OTHER; note = 2prime-O-methyl nucleosides
  modified_base order(4,6,8,10,14): mod_base = OTHER; note = 2prime-Fluoro nucleosides
  modified_base order(1..3,14..16): mod_base = OTHER; note = Phosphorothioate linkage
cagaatcacgatgcta

SEQ ID NO: 491 - RNA, 16 nt, synthetic construct
  source 1..16: mol_type = other RNA
  modified_base order(1,2,3,5,7,9,11,12,13,15,16): mod_base = OTHER; note = 2prime-O-methyl nucleosides
  modified_base order(4,6,8,10,14): mod_base = OTHER; note = 2prime-Fluoro nucleosides
  modified_base order(1..3,14..16): mod_base = OTHER; note = Phosphorothioate linkage
atgggattggattata

SEQ ID NO: 492 - RNA, 16 nt, synthetic construct
  source 1..16: mol_type = other RNA
  modified_base order(1,2,3,5,7,9,11,12,13,15,16): mod_base = OTHER; note = 2prime-O-methyl nucleosides
  modified_base order(4,6,8,10,14): mod_base = OTHER; note = 2prime-Fluoro nucleosides
  modified_base order(1..3,14..16): mod_base = OTHER; note = Phosphorothioate linkage
gattggattatcgcta

SEQ ID NO: 493 - RNA, 16 nt, synthetic construct
  source 1..16: mol_type = other RNA
  modified_base order(1,2,3,5,7,9,11,12,13,15,16): mod_base = OTHER; note = 2prime-O-methyl nucleosides
  modified_base order(4,6,8,10,14): mod_base = OTHER; note = 2prime-Fluoro nucleosides
  modified_base order(1..3,14..16): mod_base = OTHER; note = Phosphorothioate linkage
gctctggagagtgtga

SEQ ID NO: 494 - RNA, 16 nt, synthetic construct
  source 1..16: mol_type = other RNA
  modified_base order(1,2,3,5,7,9,11,12,13,15,16): mod_base = OTHER; note = 2prime-O-methyl nucleosides
  modified_base order(4,6,8,10,14): mod_base = OTHER; note = 2prime-Fluoro nucleosides
  modified_base order(1..3,14..16): mod_base = OTHER; note = Phosphorothioate linkage
gagagtgtgaatttga

SEQ ID NO: 495 - RNA, 16 nt, synthetic construct
  source 1..16: mol_type = other RNA
  modified_base order(1,2,3,5,7,9,11,12,13,15,16): mod_base = OTHER; note = 2prime-O-methyl nucleosides
  modified_base order(4,6,8,10,14): mod_base = OTHER; note = 2prime-Fluoro nucleosides
  modified_base order(1..3,14..16): mod_base = OTHER; note = Phosphorothioate linkage
agagtgtgaatttgta

SEQ ID NO: 496 - RNA, 16 nt, synthetic construct
  source 1..16: mol_type = other RNA
  modified_base order(1,2,3,5,7,9,11,12,13,15,16): mod_base = OTHER; note = 2prime-O-methyl nucleosides
  modified_base order(4,6,8,10,14): mod_base = OTHER; note = 2prime-Fluoro nucleosides
  modified_base order(1..3,14..16): mod_base = OTHER; note = Phosphorothioate linkage
ccaattaatatgctaa

SEQ ID NO: 497 - RNA, 16 nt, synthetic construct
  source 1..16: mol_type = other RNA
  modified_base order(1,2,3,5,7,9,11,12,13,15,16): mod_base = OTHER; note = 2prime-O-methyl nucleosides
  modified_base order(4,6,8,10,14): mod_base = OTHER; note = 2prime-Fluoro nucleosides
  modified_base order(1..3,14..16): mod_base = OTHER; note = Phosphorothioate linkage
caattaatatgctata

SEQ ID NO: 498 - RNA, 16 nt, synthetic construct
  source 1..16: mol_type = other RNA
  modified_base order(1,2,3,5,7,9,11,12,13,15,16): mod_base = OTHER; note = 2prime-O-methyl nucleosides
  modified_base order(4,6,8,10,14): mod_base = OTHER; note = 2prime-Fluoro nucleosides
  modified_base order(1..3,14..16): mod_base = OTHER; note = Phosphorothioate linkage
ttaatatgctatatta

SEQ ID NO: 499 - RNA, 16 nt, synthetic construct
  source 1..16: mol_type = other RNA
  modified_base order(1,2,3,5,7,9,11,12,13,15,16): mod_base = OTHER; note = 2prime-O-methyl nucleosides
  modified_base order(4,6,8,10,14): mod_base = OTHER; note = 2prime-Fluoro nucleosides
  modified_base order(1..3,14..16): mod_base = OTHER; note = Phosphorothioate linkage
gcaaagaacaaataaa

SEQ ID NO: 500 - RNA, 16 nt, synthetic construct
  source 1..16: mol_type = other RNA
  modified_base order(1,2,3,5,7,9,11,12,13,15,16): mod_base = OTHER; note = 2prime-O-methyl nucleosides
  modified_base order(4,6,8,10,14): mod_base = OTHER; note = 2prime-Fluoro nucleosides
  modified_base order(1..3,14..16): mod_base = OTHER; note = Phosphorothioate linkage
caaagaacaaataata

SEQ ID NO: 501 - RNA, 15 nt, synthetic construct
  source 1..15: mol_type = other RNA
  modified_base order(2,4,6,8,10,12,14): mod_base = OTHER; note = 2prime-O-methyl nucleosides
  modified_base order(1,3,5,7,9,11,13,15): mod_base = OTHER; note = 2prime-Fluoro nucleosides
  modified_base order(1..3,13..15): mod_base = OTHER; note = Phosphorothioate linkage
aagaacaaataataa

SEQ ID NO: 502 - RNA, 16 nt, synthetic construct
  source 1..16: mol_type = other RNA
  modified_base order(1,2,3,5,7,9,11,12,13,15,16): mod_base = OTHER; note = 2prime-O-methyl nucleosides
  modified_base order(4,6,8,10,14): mod_base = OTHER; note = 2prime-Fluoro nucleosides
  modified_base order(1..3,14..16): mod_base = OTHER; note = Phosphorothioate linkage
cataagctacagtata

SEQ ID NO: 503 - RNA, 16 nt, synthetic construct
  source 1..16: mol_type = other RNA
  modified_base order(1,2,3,5,7,9,11,12,13,15,16): mod_base = OTHER; note = 2prime-O-methyl nucleosides
  modified_base order(4,6,8,10,14): mod_base = OTHER; note = 2prime-Fluoro nucleosides
  modified_base order(1..3,14..16): mod_base = OTHER; note = Phosphorothioate linkage
atatatgcaatggtta

SEQ ID NO: 504 - RNA, 16 nt, synthetic construct
  source 1..16: mol_type = other RNA
  modified_base order(1,2,3,5,7,9,11,12,13,15,16): mod_base = OTHER; note = 2prime-O-methyl nucleosides
  modified_base order(4,6,8,10,14): mod_base = OTHER; note = 2prime-Fluoro nucleosides
  modified_base order(1..3,14..16): mod_base = OTHER; note = Phosphorothioate linkage
tgatttccagagttta

SEQ ID NO: 505 - RNA, 16 nt, synthetic construct
  source 1..16: mol_type = other RNA
  modified_base order(1,2,3,5,7,9,11,12,13,15,16): mod_base = OTHER; note = 2prime-O-methyl nucleosides
  modified_base order(4,6,8,10,14): mod_base = OTHER; note = 2prime-Fluoro nucleosides
  modified_base order(1..3,14..16): mod_base = OTHER; note = Phosphorothioate linkage
agctagaaggagatca

SEQ ID NO: 506 - RNA, 16 nt, synthetic construct
  source 1..16: mol_type = other RNA
  modified_base order(1,2,3,5,7,9,11,12,13,15,16): mod_base = OTHER; note = 2prime-O-methyl nucleosides
  modified_base order(4,6,8,10,14): mod_base = OTHER; note = 2prime-Fluoro nucleosides
  modified_base order(1..3,14..16): mod_base = OTHER; note = Phosphorothioate linkage
gctagaaggagatcaa

SEQ ID NO: 507 - RNA, 16 nt, synthetic construct
  source 1..16: mol_type = other RNA
  modified_base order(1,2,3,5,7,9,11,12,13,15,16): mod_base = OTHER; note = 2prime-O-methyl nucleosides
  modified_base order(4,6,8,10,14): mod_base = OTHER; note = 2prime-Fluoro nucleosides
  modified_base order(1..3,14..16): mod_base = OTHER; note = Phosphorothioate linkage
tcaaattacatttata

SEQ ID NO: 508 - RNA, 16 nt, synthetic construct
  source 1..16: mol_type = other RNA
  modified_base order(1,2,3,5,7,9,11,12,13,15,16): mod_base = OTHER; note = 2prime-O-methyl nucleosides
  modified_base order(4,6,8,10,14): mod_base = OTHER; note = 2prime-Fluoro nucleosides
  modified_base order(1..3,14..16): mod_base = OTHER; note = Phosphorothioate linkage
aattacatttatgtta

SEQ ID NO: 509 - RNA, 16 nt, synthetic construct
  source 1..16: mol_type = other RNA
  modified_base order(1,2,3,5,7,9,11,12,13,15,16): mod_base = OTHER; note = 2prime-O-methyl nucleosides
  modified_base order(4,6,8,10,14): mod_base = OTHER; note = 2prime-Fluoro nucleosides
  modified_base order(1..3,14..16): mod_base = OTHER; note = Phosphorothioate linkage
ttacatttatgttcca

SEQ ID NO: 510 - RNA, 16 nt, synthetic construct
  source 1..16: mol_type = other RNA
  modified_base order(1,2,3,5,7,9,11,12,13,15,16): mod_base = OTHER; note = 2prime-O-methyl nucleosides
  modified_base order(4,6,8,10,14): mod_base = OTHER; note = 2prime-Fluoro nucleosides
  modified_base order(1..3,14..16): mod_base = OTHER; note = Phosphorothioate linkage
acatttatgttcctaa

SEQ ID NO: 511 - RNA, 16 nt, synthetic construct
  source 1..16: mol_type = other RNA
  modified_base order(1,2,3,5,7,9,11,12,13,15,16): mod_base = OTHER; note = 2prime-O-methyl nucleosides
  modified_base order(4,6,8,10,14): mod_base = OTHER; note = 2prime-Fluoro nucleosides
  modified_base order(1..3,14..16): mod_base = OTHER; note = Phosphorothioate linkage
atatattacaacatca

SEQ ID NO: 512 - RNA, 16 nt, synthetic construct
  source 1..16: mol_type = other RNA
  modified_base order(1,2,3,5,7,9,11,12,13,15,16): mod_base = OTHER; note = 2prime-O-methyl nucleosides
  modified_base order(4,6,8,10,14): mod_base = OTHER; note = 2prime-Fluoro nucleosides
  modified_base order(1..3,14..16): mod_base = OTHER; note = Phosphorothioate linkage
aaatgaaagcgattca

SEQ ID NO: 513 - RNA, 16 nt, synthetic construct
  source 1..16: mol_type = other RNA
  modified_base order(1,2,3,5,7,9,11,12,13,15,16): mod_base = OTHER; note = 2prime-O-methyl nucleosides
  modified_base order(4,6,8,10,14): mod_base = OTHER; note = 2prime-Fluoro nucleosides
  modified_base order(1..3,14..16): mod_base = OTHER; note = Phosphorothioate linkage
gaattaaaggagtata

SEQ ID NO: 514 - RNA, 16 nt, synthetic construct
  source 1..16: mol_type = other RNA
  modified_base order(1,2,3,5,7,9,11,12,13,15,16): mod_base = OTHER; note = 2prime-O-methyl nucleosides
  modified_base order(4,6,8,10,14): mod_base = OTHER; note = 2prime-Fluoro nucleosides
  modified_base order(1..3,14..16): mod_base = OTHER; note = Phosphorothioate linkage
gctttaaagtctatta

SEQ ID NO: 515 - RNA, 16 nt, synthetic construct
  source 1..16: mol_type = other RNA
  modified_base order(1,2,3,5,7,9,11,12,13,15,16): mod_base = OTHER; note = 2prime-O-methyl nucleosides
  modified_base order(4,6,8,10,14): mod_base = OTHER; note = 2prime-Fluoro nucleosides
  modified_base order(1..3,14..16): mod_base = OTHER; note = Phosphorothioate linkage
aagtctatttctttaa

SEQ ID NO: 516 - RNA, 16 nt, synthetic construct
  source 1..16: mol_type = other RNA
  modified_base order(1,2,3,5,7,9,11,12,13,15,16): mod_base = OTHER; note = 2prime-O-methyl nucleosides
  modified_base order(4,6,8,10,14): mod_base = OTHER; note = 2prime-Fluoro nucleosides
  modified_base order(1..3,14..16): mod_base = OTHER; note = Phosphorothioate linkage
atttctttaaagttta

SEQ ID NO: 517 - RNA, 16 nt, synthetic construct
  source 1..16: mol_type = other RNA
  modified_base order(1,2,3,5,7,9,11,12,13,15,16): mod_base = OTHER; note = 2prime-O-methyl nucleosides
  modified_base order(4,6,8,10,14): mod_base = OTHER; note = 2prime-Fluoro nucleosides
  modified_base order(1..3,14..16): mod_base = OTHER; note = Phosphorothioate linkage
ttatataccatcatta

SEQ ID NO: 518 - RNA, 16 nt, synthetic construct
  source 1..16: mol_type = other RNA
  modified_base order(1,2,3,5,7,9,11,12,13,15,16): mod_base = OTHER; note = 2prime-O-methyl nucleosides
  modified_base order(4,6,8,10,14): mod_base = OTHER; note = 2prime-Fluoro nucleosides
  modified_base order(1..3,14..16): mod_base = OTHER; note = Phosphorothioate linkage
atatatttctgcatta

SEQ ID NO: 519 - RNA, 16 nt, synthetic construct
  source 1..16: mol_type = other RNA
  modified_base order(1,2,3,5,7,9,11,12,13,15,16): mod_base = OTHER; note = 2prime-O-methyl nucleosides
  modified_base order(4,6,8,10,14): mod_base = OTHER; note = 2prime-Fluoro nucleosides
  modified_base order(1..3,14..16): mod_base = OTHER; note = Phosphorothioate linkage
tcatccttaaacacta

SEQ ID NO: 520 - RNA, 16 nt, synthetic construct
  source 1..16: mol_type = other RNA
  modified_base order(1,2,3,5,7,9,11,12,13,15,16): mod_base = OTHER; note = 2prime-O-methyl nucleosides
  modified_base order(4,6,8,10,14): mod_base = OTHER; note = 2prime-Fluoro nucleosides
  modified_base order(1..3,14..16): mod_base = OTHER; note = Phosphorothioate linkage
aacacttgaatttata

SEQ ID NO: 521 - RNA, 16 nt, synthetic construct
  source 1..16: mol_type = other RNA
  modified_base order(1,2,3,5,7,9,11,12,13,15,16): mod_base = OTHER; note = 2prime-O-methyl nucleosides
  modified_base order(4,6,8,10,14): mod_base = OTHER; note = 2prime-Fluoro nucleosides
  modified_base order(1..3,14..16): mod_base = OTHER; note = Phosphorothioate linkage
acttgaatttatatta

SEQ ID NO: 522 - RNA, 16 nt, synthetic construct
  source 1..16: mol_type = other RNA
  modified_base order(1,2,3,5,7,9,11,12,13,15,16): mod_base = OTHER; note = 2prime-O-methyl nucleosides
  modified_base order(4,6,8,10,14): mod_base = OTHER; note = 2prime-Fluoro nucleosides
  modified_base order(1..3,14..16): mod_base = OTHER; note = Phosphorothioate linkage
gaatttatattgtata

SEQ ID NO: 523 - RNA, 16 nt, synthetic construct
  source 1..16: mol_type = other RNA
  modified_base order(1,2,3,5,7,9,11,12,13,15,16): mod_base = OTHER; note = 2prime-O-methyl nucleosides
  modified_base order(4,6,8,10,14): mod_base = OTHER; note = 2prime-Fluoro nucleosides
  modified_base order(1..3,14..16): mod_base = OTHER; note = Phosphorothioate linkage
atggtgcagcatatga

SEQ ID NO: 524 - RNA, 16 nt, synthetic construct
  source 1..16: mol_type = other RNA
  modified_base order(1,2,3,5,7,9,11,12,13,15,16): mod_base = OTHER; note = 2prime-O-methyl nucleosides
  modified_base order(4,6,8,10,14): mod_base = OTHER; note = 2prime-Fluoro nucleosides
  modified_base order(1..3,14..16): mod_base = OTHER; note = Phosphorothioate linkage
gcatatgcaatttcca

SEQ ID NO: 525 - RNA, 16 nt, synthetic construct
  source 1..16: mol_type = other RNA
  modified_base order(1,2,3,5,7,9,11,12,13,15,16): mod_base = OTHER; note = 2prime-O-methyl nucleosides
  modified_base order(4,6,8,10,14): mod_base = OTHER; note = 2prime-Fluoro nucleosides
  modified_base order(1..3,14..16): mod_base = OTHER; note = Phosphorothioate linkage
aaactgcattatctta

SEQ ID NO: 526 - RNA, 16 nt, synthetic construct
  source 1..16: mol_type = other RNA
  modified_base order(1,2,3,5,7,9,11,12,13,15,16): mod_base = OTHER; note = 2prime-O-methyl nucleosides
  modified_base order(4,6,8,10,14): mod_base = OTHER; note = 2prime-Fluoro nucleosides
  modified_base order(1..3,14..16): mod_base = OTHER; note = Phosphorothioate linkage
agaagtatgtaattta

SEQ ID NO: 527 - RNA, 16 nt, synthetic construct
  source 1..16: mol_type = other RNA
  modified_base order(1,2,3,5,7,9,11,12,13,15,16): mod_base = OTHER; note = 2prime-O-methyl nucleosides
  modified_base order(4,6,8,10,14): mod_base = OTHER; note = 2prime-Fluoro nucleosides
  modified_base order(1..3,14..16): mod_base = OTHER; note = Phosphorothioate linkage
cctttgcaacactgca

SEQ ID NO: 528 - RNA, 16 nt, synthetic construct
  source 1..16: mol_type = other RNA
  modified_base order(1,2,3,5,7,9,11,12,13,15,16): mod_base = OTHER; note = 2prime-O-methyl nucleosides
  modified_base order(4,6,8,10,14): mod_base = OTHER; note = 2prime-Fluoro nucleosides
  modified_base order(1..3,14..16): mod_base = OTHER; note = Phosphorothioate linkage
gcaacactgcagttta

SEQ ID NO: 529 - RNA, 16 nt, synthetic construct
  source 1..16: mol_type = other RNA
  modified_base order(1,2,3,5,7,9,11,12,13,15,16): mod_base = OTHER; note = 2prime-O-methyl nucleosides
  modified_base order(4,6,8,10,14): mod_base = OTHER; note = 2prime-Fluoro nucleosides
  modified_base order(1..3,14..16): mod_base = OTHER; note = Phosphorothioate linkage
gaaatgatcgactcta

SEQ ID NO: 530 - RNA, 16 nt, synthetic construct
  source 1..16: mol_type = other RNA
  modified_base order(1,2,3,5,7,9,11,12,13,15,16): mod_base = OTHER; note = 2prime-O-methyl nucleosides
  modified_base order(4,6,8,10,14): mod_base = OTHER; note = 2prime-Fluoro nucleosides
  modified_base order(1..3,14..16): mod_base = OTHER; note = Phosphorothioate linkage
aaatgatcgactctaa

SEQ ID NO: 531 - RNA, 16 nt, synthetic construct
  source 1..16: mol_type = other RNA
  modified_base order(1,2,3,5,7,9,11,12,13,15,16): mod_base = OTHER; note = 2prime-O-methyl nucleosides
  modified_base order(4,6,8,10,14): mod_base = OTHER; note = 2prime-Fluoro nucleosides
  modified_base order(1..3,14..16): mod_base = OTHER; note = Phosphorothioate linkage
gactctatcaatatta

SEQ ID NO: 532 - RNA, 16 nt, synthetic construct
  source 1..16: mol_type = other RNA
  modified_base order(1,2,3,5,7,9,11,12,13,15,16): mod_base = OTHER; note = 2prime-O-methyl nucleosides
  modified_base order(4,6,8,10,14): mod_base = OTHER; note = 2prime-Fluoro nucleosides
  modified_base order(1..3,14..16): mod_base = OTHER; note = Phosphorothioate linkage
ctatcaatattgtata

SEQ ID NO: 533 - RNA, 16 nt, synthetic construct
  source 1..16: mol_type = other RNA
  modified_base order(1,2,3,5,7,9,11,12,13,15,16): mod_base = OTHER; note = 2prime-O-methyl nucleosides
  modified_base order(4,6,8,10,14): mod_base = OTHER; note = 2prime-Fluoro nucleosides
  modified_base order(1..3,14..16): mod_base = OTHER; note = Phosphorothioate linkage
gactgaaacaatgcaa

SEQ ID NO: 534 - RNA, 16 nt, synthetic construct
  source 1..16: mol_type = other RNA
  modified_base order(1,2,3,5,7,9,11,12,13,15,16): mod_base = OTHER; note = 2prime-O-methyl nucleosides
  modified_base order(4,6,8,10,14): mod_base = OTHER; note = 2prime-Fluoro nucleosides
  modified_base order(1..3,14..16): mod_base = OTHER; note = Phosphorothioate linkage
aaacaatgcatttata

SEQ ID NO: 535 - RNA, 16 nt, synthetic construct
  source 1..16: mol_type = other RNA
  modified_base order(1,2,3,5,7,9,11,12,13,15,16): mod_base = OTHER; note = 2prime-O-methyl nucleosides
  modified_base order(4,6,8,10,14): mod_base = OTHER; note = 2prime-Fluoro nucleosides
  modified_base order(1..3,14..16): mod_base = OTHER; note = Phosphorothioate linkage
acaatgcatttatata

SEQ ID NO: 536 - RNA, 16 nt, synthetic construct
  source 1..16: mol_type = other RNA
  modified_base order(1,2,3,5,7,9,11,12,13,15,16): mod_base = OTHER; note = 2prime-O-methyl nucleosides
  modified_base order(4,6,8,10,14): mod_base = OTHER; note = 2prime-Fluoro nucleosides
  modified_base order(1..3,14..16): mod_base = OTHER; note = Phosphorothioate linkage
caatgcatttatataa

SEQ ID NO: 537 - RNA, 16 nt, synthetic construct
  source 1..16: mol_type = other RNA
  modified_base order(1,2,3,5,7,9,11,12,13,15,16): mod_base = OTHER; note = 2prime-O-methyl nucleosides
  modified_base order(4,6,8,10,14): mod_base = OTHER; note = 2prime-Fluoro nucleosides
  modified_base order(1..3,14..16): mod_base = OTHER; note = Phosphorothioate linkage
taatatgtatacaata

SEQ ID NO: 538 - RNA, 16 nt, synthetic construct
  source 1..16: mol_type = other RNA
  modified_base order(1,2,3,5,7,9,11,12,13,15,16): mod_base = OTHER; note = 2prime-O-methyl nucleosides
  modified_base order(4,6,8,10,14): mod_base = OTHER; note = 2prime-Fluoro nucleosides
  modified_base order(1..3,14..16): mod_base = OTHER; note = Phosphorothioate linkage
tatgtatacaatatta

SEQ ID NO: 539 - RNA, 16 nt, synthetic construct
  source 1..16: mol_type = other RNA
  modified_base order(1,2,3,5,7,9,11,12,13,15,16): mod_base = OTHER; note = 2prime-O-methyl nucleosides
  modified_base order(4,6,8,10,14): mod_base = OTHER; note = 2prime-Fluoro nucleosides
  modified_base order(1..3,14..16): mod_base = OTHER; note = Phosphorothioate linkage
tatacaatattgttta

SEQ ID NO: 540 - RNA, 16 nt, synthetic construct
  source 1..16: mol_type = other RNA
  modified_base order(1,2,3,5,7,9,11,12,13,15,16): mod_base = OTHER; note = 2prime-O-methyl nucleosides
  modified_base order(4,6,8,10,14): mod_base = OTHER; note = 2prime-Fluoro nucleosides
  modified_base order(1..3,14..16): mod_base = OTHER; note = Phosphorothioate linkage
ttgtaaataagtgtca

SEQ ID NO: 541 - RNA, 16 nt, synthetic construct
  source 1..16: mol_type = other RNA
  modified_base order(1,2,3,5,7,9,11,12,13,15,16): mod_base = OTHER; note = 2prime-O-methyl nucleosides
  modified_base order(4,6,8,10,14): mod_base = OTHER; note = 2prime-Fluoro nucleosides
  modified_base order(1..3,14..16): mod_base = OTHER; note = Phosphorothioate linkage
gtaaataagtgtctca

SEQ ID NO: 542 - RNA, 16 nt, synthetic construct
  source 1..16: mol_type = other RNA
  modified_base order(1,2,3,5,7,9,11,12,13,15,16): mod_base = OTHER; note = 2prime-O-methyl nucleosides
  modified_base order(4,6,8,10,14): mod_base = OTHER; note = 2prime-Fluoro nucleosides
  modified_base order(1..3,14..16): mod_base = OTHER; note = Phosphorothioate linkage
taaataagtgtctcca

SEQ ID NO: 543 - RNA, 16 nt, synthetic construct
  source 1..16: mol_type = other RNA
  modified_base order(1,2,3,5,7,9,11,12,13,15,16): mod_base = OTHER; note = 2prime-O-methyl nucleosides
  modified_base order(4,6,8,10,14): mod_base = OTHER; note = 2prime-Fluoro nucleosides
  modified_base order(1..3,14..16): mod_base = OTHER; note = Phosphorothioate linkage
aaataagtgtctccta

SEQ ID NO: 544 - RNA, 16 nt, synthetic construct
  source 1..16: mol_type = other RNA
  modified_base order(1,2,3,5,7,9,11,12,13,15,16): mod_base = OTHER; note = 2prime-O-methyl nucleosides
  modified_base order(4,6,8,10,14): mod_base = OTHER; note = 2prime-Fluoro nucleosides
  modified_base order(1..3,14..16): mod_base = OTHER; note = Phosphorothioate linkage
acactaaggacattta

SEQ ID NO: 545 - RNA, 16 nt, synthetic construct
  source 1..16: mol_type = other RNA
  modified_base order(1,2,3,5,7,9,11,12,13,15,16): mod_base = OTHER; note = 2prime-O-methyl nucleosides
  modified_base order(4,6,8,10,14): mod_base = OTHER; note = 2prime-Fluoro nucleosides
  modified_base order(1..3,14..16): mod_base = OTHER; note = Phosphorothioate linkage
actaaggacatttcaa

SEQ ID NO: 546 - RNA, 16 nt, synthetic construct
  source 1..16: mol_type = other RNA
  modified_base order(1,2,3,5,7,9,11,12,13,15,16): mod_base = OTHER; note = 2prime-O-methyl nucleosides
  modified_base order(4,6,8,10,14): mod_base = OTHER; note = 2prime-Fluoro nucleosides
  modified_base order(1..3,14..16): mod_base = OTHER; note = Phosphorothioate linkage
acatttcaaattaaga

SEQ ID NO: 547 - RNA, 16 nt, synthetic construct
  source 1..16: mol_type = other RNA
  modified_base order(1,2,3,5,7,9,11,12,13,15,16): mod_base = OTHER; note = 2prime-O-methyl nucleosides
  modified_base order(4,6,8,10,14): mod_base = OTHER; note = 2prime-Fluoro nucleosides
  modified_base order(1..3,14..16): mod_base = OTHER; note = Phosphorothioate linkage
gcagattaaatagtga

SEQ ID NO: 548 - RNA, 16 nt, synthetic construct
  source 1..16: mol_type = other RNA
  modified_base order(1,2,3,5,7,9,11,12,13,15,16): mod_base = OTHER; note = 2prime-O-methyl nucleosides
  modified_base order(4,6,8,10,14): mod_base = OTHER; note = 2prime-Fluoro nucleosides
  modified_base order(1..3,14..16): mod_base = OTHER; note = Phosphorothioate linkage
cagattaaatagtgga

SEQ ID NO: 549 - RNA, 16 nt, synthetic construct
  source 1..16: mol_type = other RNA
  modified_base order(1,2,3,5,7,9,11,12,13,15,16): mod_base = OTHER; note = 2prime-O-methyl nucleosides
  modified_base order(4,6,8,10,14): mod_base = OTHER; note = 2prime-Fluoro nucleosides
  modified_base order(1..3,14..16): mod_base = OTHER; note = Phosphorothioate linkage
agattaaatagtggta

SEQ ID NO: 550 - RNA, 16 nt, synthetic construct
  source 1..16: mol_type = other RNA
  modified_base order(1,2,3,5,7,9,11,12,13,15,16): mod_base = OTHER; note = 2prime-O-methyl nucleosides
  modified_base order(4,6,8,10,14): mod_base = OTHER; note = 2prime-Fluoro nucleosides
  modified_base order(1..3,14..16): mod_base = OTHER; note = Phosphorothioate linkage
taatgattagatggta

SEQ ID NO: 551 - RNA, 16 nt, synthetic construct
  source 1..16: mol_type = other RNA
  modified_base order(1,2,3,5,7,9,11,12,13,15,16): mod_base = OTHER; note = 2prime-O-methyl nucleosides
  modified_base order(4,6,8,10,14): mod_base = OTHER; note = 2prime-Fluoro nucleosides
  modified_base order(1..3,14..16): mod_base = OTHER; note = Phosphorothioate linkage
gatggttatattacaa

SEQ ID NO: 552 - RNA, 16 nt, synthetic construct
  source 1..16: mol_type = other RNA
  modified_base order(1,2,3,5,7,9,11,12,13,15,16): mod_base = OTHER; note = 2prime-O-methyl nucleosides
  modified_base order(4,6,8,10,14): mod_base = OTHER; note = 2prime-Fluoro nucleosides
  modified_base order(1..3,14..16): mod_base = OTHER; note = Phosphorothioate linkage
ttatattacaatcata

SEQ ID NO: 553 - RNA, 16 nt, synthetic construct
  source 1..16: mol_type = other RNA
  modified_base order(1,2,3,5,7,9,11,12,13,15,16): mod_base = OTHER; note = 2prime-O-methyl nucleosides
  modified_base order(4,6,8,10,14): mod_base = OTHER; note = 2prime-Fluoro nucleosides
  modified_base order(1..3,14..16): mod_base = OTHER; note = Phosphorothioate linkage
acatgattaacattca

SEQ ID NO: 554 - RNA, 16 nt, synthetic construct
  source 1..16: mol_type = other RNA
  modified_base order(1,2,3,5,7,9,11,12,13,15,16): mod_base = OTHER; note = 2prime-O-methyl nucleosides
  modified_base order(4,6,8,10,14): mod_base = OTHER; note = 2prime-Fluoro nucleosides
  modified_base order(1..3,14..16): mod_base = OTHER; note = Phosphorothioate linkage
catgattaacattcaa

SEQ ID NO: 555 - RNA, 16 nt, synthetic construct
  source 1..16: mol_type = other RNA
  modified_base order(1,2,3,5,7,9,11,12,13,15,16): mod_base = OTHER; note = 2prime-O-methyl nucleosides
  modified_base order(4,6,8,10,14): mod_base = OTHER; note = 2prime-Fluoro nucleosides
  modified_base order(1..3,14..16): mod_base = OTHER; note = Phosphorothioate linkage
gtataaagtgaattta

SEQ ID NO: 556 - RNA, 16 nt, synthetic construct
  source 1..16: mol_type = other RNA
  modified_base order(1,2,3,5,7,9,11,12,13,15,16): mod_base = OTHER; note = 2prime-O-methyl nucleosides
  modified_base order(4,6,8,10,14): mod_base = OTHER; note = 2prime-Fluoro nucleosides
  modified_base order(1..3,14..16): mod_base = OTHER; note = Phosphorothioate linkage
aaatttcaatggttta

SEQ ID NO: 557 - RNA, 16 nt, synthetic construct
  source 1..16: mol_type = other RNA
  modified_base order(1,2,3,5,7,9,11,12,13,15,16): mod_base = OTHER; note = 2prime-O-methyl nucleosides
  modified_base order(4,6,8,10,14): mod_base = OTHER; note = 2prime-Fluoro nucleosides
  modified_base order(1..3,14..16): mod_base = OTHER; note = Phosphorothioate linkage
atttcaatggtttaca

SEQ ID NO: 558 - RNA, 16 nt, synthetic construct
  source 1..16: mol_type = other RNA
  modified_base order(1,2,3,5,7,9,11,12,13,15,16): mod_base = OTHER; note = 2prime-O-methyl nucleosides
  modified_base order(4,6,8,10,14): mod_base = OTHER; note = 2prime-Fluoro nucleosides
  modified_base order(1..3,14..16): mod_base = OTHER; note = Phosphorothioate linkage
ttgtgtttaaatctca

SEQ ID NO: 559 - RNA, 16 nt, synthetic construct
  source 1..16: mol_type = other RNA
  modified_base order(1,2,3,5,7,9,11,12,13,15,16): mod_base = OTHER; note = 2prime-O-methyl nucleosides
  modified_base order(4,6,8,10,14): mod_base = OTHER; note = 2prime-Fluoro nucleosides
  modified_base order(1..3,14..16): mod_base = OTHER; note = Phosphorothioate linkage
ttaaatctcaacgtta

SEQ ID NO: 560 - RNA, 16 nt, synthetic construct
  source 1..16: mol_type = other RNA
  modified_base order(1,2,3,5,7,9,11,12,13,15,16): mod_base = OTHER; note = 2prime-O-methyl nucleosides
  modified_base order(4,6,8,10,14): mod_base = OTHER; note = 2prime-Fluoro nucleosides
  modified_base order(1..3,14..16): mod_base = OTHER; note = Phosphorothioate linkage
aaatctcaacgttcca

SEQ ID NO: 561 - RNA, 16 nt, synthetic construct
  source 1..16: mol_type = other RNA
  modified_base order(1,2,3,5,7,9,11,12,13,15,16): mod_base = OTHER; note = 2prime-O-methyl nucleosides
  modified_base order(4,6,8,10,14): mod_base = OTHER; note = 2prime-Fluoro nucleosides
  modified_base order(1..3,14..16): mod_base = OTHER; note = Phosphorothioate linkage
aactgatgctatctca

SEQ ID NO: 562 - RNA, 16 nt, synthetic construct
  source 1..16: mol_type = other RNA
  modified_base order(1,2,3,5,7,9,11,12,13,15,16): mod_base = OTHER; note = 2prime-O-methyl nucleosides
  modified_base order(4,6,8,10,14): mod_base = OTHER; note = 2prime-Fluoro nucleosides
  modified_base order(1..3,14..16): mod_base = OTHER; note = Phosphorothioate linkage
tcaacaataactgtta

SEQ ID NO: 563 - RNA, 16 nt, synthetic construct
  source 1..16: mol_type = other RNA
  modified_base order(1,2,3,5,7,9,11,12,13,15,16): mod_base = OTHER; note = 2prime-O-methyl nucleosides
  modified_base order(4,6,8,10,14): mod_base = OTHER; note = 2prime-Fluoro nucleosides
  modified_base order(1..3,14..16): mod_base = OTHER; note = Phosphorothioate linkage
caacaataactgttaa

SEQ ID NO: 564 - RNA, 16 nt, synthetic construct
  source 1..16: mol_type = other RNA
  modified_base order(1,2,3,5,7,9,11,12,13,15,16): mod_base = OTHER; note = 2prime-O-methyl nucleosides
  modified_base order(4,6,8,10,14): mod_base = OTHER; note = 2prime-Fluoro nucleosides
  modified_base order(1..3,14..16): mod_base = OTHER; note = Phosphorothioate linkage
taatttgataatgaaa

SEQ ID NO: 565 - RNA, 16 nt, synthetic construct
  source 1..16: mol_type = other RNA
  modified_base order(1,2,3,5,7,9,11,12,13,15,16): mod_base = OTHER; note = 2prime-O-methyl nucleosides
  modified_base order(4,6,8,10,14): mod_base = OTHER; note = 2prime-Fluoro nucleosides
  modified_base order(1..3,14..16): mod_base = OTHER; note = Phosphorothioate linkage
taatgaatatatttca

SEQ ID NO: 566 - RNA, 16 nt, synthetic construct
  source 1..16: mol_type = other RNA
  modified_base order(1,2,3,5,7,9,11,12,13,15,16): mod_base = OTHER; note = 2prime-O-methyl nucleosides
  modified_base order(4,6,8,10,14): mod_base = OTHER; note = 2prime-Fluoro nucleosides
  modified_base order(1..3,14..16): mod_base = OTHER; note = Phosphorothioate linkage
aatgaatatatttcta

SEQ ID NO: 567 - RNA, 16 nt, synthetic construct
  source 1..16: mol_type = other RNA
  modified_base order(1,2,3,5,7,9,11,12,13,15,16): mod_base = OTHER; note = 2prime-O-methyl nucleosides
  modified_base order(4,6,8,10,14): mod_base = OTHER; note = 2prime-Fluoro nucleosides
  modified_base order(1..3,14..16): mod_base = OTHER; note = Phosphorothioate linkage
gaatatatttctgcaa

SEQ ID NO: 568 - RNA, 16 nt, synthetic construct
  source 1..16: mol_type = other RNA
  modified_base order(1,2,3,5,7,9,11,12,13,15,16): mod_base = OTHER; note = 2prime-O-methyl nucleosides
  modified_base order(4,6,8,10,14): mod_base = OTHER; note = 2prime-Fluoro nucleosides
  modified_base order(1..3,14..16): mod_base = OTHER; note = Phosphorothioate linkage
ctgcatttatttacta

SEQ ID NO: 569 - RNA, 16 nt, synthetic construct
  source 1..16: mol_type = other RNA
  modified_base order(1,2,3,5,7,9,11,12,13,15,16): mod_base = OTHER; note = 2prime-O-methyl nucleosides
  modified_base order(4,6,8,10,14): mod_base = OTHER; note = 2prime-Fluoro nucleosides
  modified_base order(1..3,14..16): mod_base = OTHER; note = Phosphorothioate linkage
atttatttacttctga

SEQ ID NO: 570 - RNA, 16 nt, synthetic construct
  source 1..16: mol_type = other RNA
  modified_base order(1,2,3,5,7,9,11,12,13,15,16): mod_base = OTHER; note = 2prime-O-methyl nucleosides
  modified_base order(4,6,8,10,14): mod_base = OTHER; note = 2prime-Fluoro nucleosides
  modified_base order(1..3,14..16): mod_base = OTHER; note = Phosphorothioate linkage
taatcaaatttattga

SEQ ID NO: 571 - RNA, 16 nt, synthetic construct
  source 1..16: mol_type = other RNA
  modified_base order(1,2,3,5,7,9,11,12,13,15,16): mod_base = OTHER; note = 2prime-O-methyl nucleosides
  modified_base order(4,6,8,10,14): mod_base = OTHER; note = 2prime-Fluoro nucleosides
  modified_base order(1..3,14..16): mod_base = OTHER; note = Phosphorothioate linkage
actaaatgaaattata

SEQ ID NO: 572 - RNA, 16 nt, synthetic construct
  source 1..16: mol_type = other RNA
  modified_base order(1,2,3,5,7,9,11,12,13,15,16): mod_base = OTHER; note = 2prime-O-methyl nucleosides
  modified_base order(4,6,8,10,14): mod_base = OTHER; note = 2prime-Fluoro nucleosides
  modified_base order(1..3,14..16): mod_base = OTHER; note = Phosphorothioate linkage
ctaaatgaaattatta

SEQ ID NO: 573 - RNA, 16 nt, synthetic construct
  source 1..16: mol_type = other RNA
  modified_base order(1,2,3,5,7,9,11,12,13,15,16): mod_base = OTHER; note = 2prime-O-methyl nucleosides
  modified_base order(4,6,8,10,14): mod_base = OTHER; note = 2prime-Fluoro nucleosides
  modified_base order(1..3,14..16): mod_base = OTHER; note = Phosphorothioate linkage
cttacatctaatttga

SEQ ID NO: 574 - RNA, 16 nt, synthetic construct
  source 1..16: mol_type = other RNA
  modified_base order(1,2,3,5,7,9,11,12,13,15,16): mod_base = OTHER; note = 2prime-O-methyl nucleosides
  modified_base order(4,6,8,10,14): mod_base = OTHER; note = 2prime-Fluoro nucleosides
  modified_base order(1..3,14..16): mod_base = OTHER; note = Phosphorothioate linkage
acatctaatttgtaga

SEQ ID NO: 575 - RNA, 16 nt, synthetic construct
  source 1..16: mol_type = other RNA
  modified_base order(1,2,3,5,7,9,11,12,13,15,16): mod_base = OTHER; note = 2prime-O-methyl nucleosides
  modified_base order(4,6,8,10,14): mod_base = OTHER; note = 2prime-Fluoro nucleosides
  modified_base order(1..3,14..16): mod_base = OTHER; note = Phosphorothioate linkage
tagaaacagtataaga

SEQ ID NO: 576 - RNA, 16 nt, synthetic construct
  source 1..16: mol_type = other RNA
  modified_base order(1,2,3,5,7,9,11,12,13,15,16): mod_base = OTHER; note = 2prime-O-methyl nucleosides
  modified_base order(4,6,8,10,14): mod_base = OTHER; note = 2prime-Fluoro nucleosides
  modified_base order(1..3,14..16): mod_base = OTHER; note = Phosphorothioate linkage
gaaacagtataagtta

SEQ ID NO: 577 - RNA, 16 nt, synthetic construct
  source 1..16: mol_type = other RNA
  modified_base order(1,2,3,5,7,9,11,12,13,15,16): mod_base = OTHER; note = 2prime-O-methyl nucleosides
  modified_base order(4,6,8,10,14): mod_base = OTHER; note = 2prime-Fluoro nucleosides
  modified_base order(1..3,14..16): mod_base = OTHER; note = Phosphorothioate linkage
acagtataagttataa

SEQ ID NO: 578 - RNA, 21 nt, synthetic construct
  source 1..21: mol_type = other RNA
  modified_base order(1,3,7,9,11,13,15,17,18,19,20): mod_base = OTHER; note = 2prime-O-methyl nucleosides
  modified_base order(2,4,5,6,8,10,12,14,16,21): mod_base = OTHER; note = 2prime-Fluoro nucleosides
  modified_base order(1..3,14..21): mod_base = OTHER; note = Phosphorothioate linkage
  modified_base 1: mod_base = OTHER; note = 5prime-(E)-Vinylphosphonate
tcaagtacatgcattacactt

SEQ ID NO: 579 - RNA, 21 nt, synthetic construct
  source 1..21: mol_type = other RNA
  modified_base order(1,3,7,9,11,13,15,17,18,19,20): mod_base = OTHER; note = 2prime-O-methyl nucleosides
  modified_base order(2,4,5,6,8,10,12,14,16,21): mod_base = OTHER; note = 2prime-Fluoro nucleosides
  modified_base order(1..3,14..21): mod_base = OTHER; note = Phosphorothioate linkage
  modified_base 1: mod_base = OTHER; note = 5prime-(E)-Vinylphosphonate
ttaatggcttctattcttgtt

SEQ ID NO: 580 - RNA, 21 nt, synthetic construct
  source 1..21: mol_type = other RNA
  modified_base order(1,3,7,9,11,13,15,17,18,19,20): mod_base = OTHER; note = 2prime-O-methyl nucleosides
  modified_base order(2,4,5,6,8,10,12,14,16,21): mod_base = OTHER; note = 2prime-Fluoro nucleosides
  modified_base order(1..3,14..21): mod_base = OTHER; note = Phosphorothioate linkage
  modified_base 1: mod_base = OTHER; note = 5prime-(E)-Vinylphosphonate
tggatttgtatcttaatggtt

SEQ ID NO: 581 - RNA, 21 nt, synthetic construct
  source 1..21: mol_type = other RNA
  modified_base order(1,3,7,9,11,13,15,17,18,19,20): mod_base = OTHER; note = 2prime-O-methyl nucleosides
  modified_base order(2,4,5,6,8,10,12,14,16,21): mod_base = OTHER; note = 2prime-Fluoro nucleosides
  modified_base order(1..3,14..21): mod_base = OTHER; note = Phosphorothioate linkage
  modified_base 1: mod_base = OTHER; note = 5prime-(E)-Vinylphosphonate
ttaacatctttgctgatgttt

SEQ ID NO: 582 - RNA, 21 nt, synthetic construct
  source 1..21: mol_type = other RNA
  modified_base order(1,3,7,9,11,13,15,17,18,19,20): mod_base = OTHER; note = 2prime-O-methyl nucleosides
  modified_base order(2,4,5,6,8,10,12,14,16,21): mod_base = OTHER; note = 2prime-Fluoro nucleosides
  modified_base order(1..3,14..21): mod_base = OTHER; note = Phosphorothioate linkage
  modified_base 1: mod_base = OTHER; note = 5prime-(E)-Vinylphosphonate
ttaaatttaaagaagcaactt

SEQ ID NO: 583 - RNA, 21 nt, synthetic construct
  source 1..21: mol_type = other RNA
  modified_base order(1,3,7,9,11,13,15,17,18,19,20): mod_base = OTHER; note = 2prime-O-methyl nucleosides
  modified_base order(2,4,5,6,8,10,12,14,16,21): mod_base = OTHER; note = 2prime-Fluoro nucleosides
  modified_base order(1..3,14..21): mod_base = OTHER; note = Phosphorothioate linkage
  modified_base 1: mod_base = OTHER; note = 5prime-(E)-Vinylphosphonate
tcatagttgggcctttacttt

SEQ ID NO: 584 - RNA, 21 nt, synthetic construct
  source 1..21: mol_type = other RNA
  modified_base order(1,3,7,9,11,13,15,17,18,19,20): mod_base = OTHER; note = 2prime-O-methyl nucleosides
  modified_base order(2,4,5,6,8,10,12,14,16,21): mod_base = OTHER; note = 2prime-Fluoro nucleosides
  modified_base order(1..3,14..21): mod_base = OTHER; note = Phosphorothioate linkage
  modified_base 1: mod_base = OTHER; note = 5prime-(E)-Vinylphosphonate
tcactgttgtaggagtctctt

SEQ ID NO: 585 - RNA, 21 nt, synthetic construct
  source 1..21: mol_type = other RNA
  modified_base order(1,3,7,9,11,13,15,17,18,19,20): mod_base = OTHER; note = 2prime-O-methyl nucleosides
  modified_base order(2,4,5,6,8,10,12,14,16,21): mod_base = OTHER; note = 2prime-Fluoro nucleosides
  modified_base order(1..3,14..21): mod_base = OTHER; note = Phosphorothioate linkage
  modified_base 1: mod_base = OTHER; note = 5prime-(E)-Vinylphosphonate
tcaaacactgttgtaggagtt

SEQ ID NO: 586 - RNA, 21 nt, synthetic construct
  source 1..21: mol_type = other RNA
  modified_base order(1,3,7,9,11,13,15,17,18,19,20): mod_base = OTHER; note = 2prime-O-methyl nucleosides
  modified_base order(2,4,5,6,8,10,12,14,16,21): mod_base = OTHER; note = 2prime-Fluoro nucleosides
  modified_base order(1..3,14..21): mod_base = OTHER; note = Phosphorothioate linkage
  modified_base 1: mod_base = OTHER; note = 5prime-(E)-Vinylphosphonate
tgcaacactgtcttcacattt

SEQ ID NO: 587 - RNA, 21 nt, synthetic construct
  source 1..21: mol_type = other RNA
  modified_base order(1,3,7,9,11,13,15,17,18,19,20): mod_base = OTHER; note = 2prime-O-methyl nucleosides
  modified_base order(2,4,5,6,8,10,12,14,16,21): mod_base = OTHER; note = 2prime-Fluoro nucleosides
  modified_base order(1..3,14..21): mod_base = OTHER; note = Phosphorothioate linkage
  modified_base 1: mod_base = OTHER; note = 5prime-(E)-Vinylphosphonate
tagcatcgtgattctgttgtt

SEQ ID NO: 588 - RNA, 21 nt, synthetic construct
  source 1..21: mol_type = other RNA
  modified_base order(1,3,7,9,11,13,15,17,18,19,20): mod_base = OTHER; note = 2prime-O-methyl nucleosides
  modified_base order(2,4,5,6,8,10,12,14,16,21): mod_base = OTHER; note = 2prime-Fluoro nucleosides
  modified_base order(1..3,14..21): mod_base = OTHER; note = Phosphorothioate linkage
  modified_base 1: mod_base = OTHER; note = 5prime-(E)-Vinylphosphonate
tataatccaatcccatccatt

SEQ ID NO: 589 - RNA, 21 nt, synthetic construct
  source 1..21: mol_type = other RNA
  modified_base order(1,3,7,9,11,13,15,17,18,19,20): mod_base = OTHER; note = 2prime-O-methyl nucleosides
  modified_base order(2,4,5,6,8,10,12,14,16,21): mod_base = OTHER; note = 2prime-Fluoro nucleosides
  modified_base order(1..3,14..21): mod_base = OTHER; note = Phosphorothioate linkage
  modified_base 1: mod_base = OTHER; note = 5prime-(E)-Vinylphosphonate
tagcgataatccaatcccatt

SEQ ID NO: 590 - RNA, 21 nt, synthetic construct
  source 1..21: mol_type = other RNA
  modified_base order(1,3,7,9,11,13,15,17,18,19,20): mod_base = OTHER; note = 2prime-O-methyl nucleosides
  modified_base order(2,4,5,6,8,10,12,14,16,21): mod_base = OTHER; note = 2prime-Fluoro nucleosides
  modified_base order(1..3,14..21): mod_base = OTHER; note = Phosphorothioate linkage
  modified_base 1: mod_base = OTHER; note = 5prime-(E)-Vinylphosphonate
tcacactctccagagcagttt

SEQ ID NO: 591 - RNA, 21 nt, synthetic construct
  source 1..21: mol_type = other RNA
  modified_base order(1,3,7,9,11,13,15,17,18,19,20): mod_base = OTHER; note = 2prime-O-methyl nucleosides
  modified_base order(2,4,5,6,8,10,12,14,16,21): mod_base = OTHER; note = 2prime-Fluoro nucleosides
  modified_base order(1..3,14..21): mod_base = OTHER; note = Phosphorothioate linkage
  modified_base 1: mod_base = OTHER; note = 5prime-(E)-Vinylphosphonate
tcaaattcacactctccagtt

SEQ ID NO: 592 - RNA, 21 nt, synthetic construct
  source 1..21: mol_type = other RNA
  modified_base order(1,3,7,9,11,13,15,17,18,19,20): mod_base = OTHER; note = 2prime-O-methyl nucleosides
  modified_base order(2,4,5,6,8,10,12,14,16,21): mod_base = OTHER; note = 2prime-Fluoro nucleosides
  modified_base order(1..3,14..21): mod_base = OTHER; note = Phosphorothioate linkage
  modified_base 1: mod_base = OTHER; note = 5prime-(E)-Vinylphosphonate
tacaaattcacactctccatt

SEQ ID NO: 593 - RNA, 21 nt, synthetic construct
  source 1..21: mol_type = other RNA
  modified_base order(1,3,7,9,11,13,15,17,18,19,20): mod_base = OTHER; note = 2prime-O-methyl nucleosides
  modified_base order(2,4,5,6,8,10,12,14,16,21): mod_base = OTHER; note = 2prime-Fluoro nucleosides
  modified_base order(1..3,14..21): mod_base = OTHER; note = Phosphorothioate linkage
  modified_base 1: mod_base = OTHER; note = 5prime-(E)-Vinylphosphonate
ttagcatattaattggagatt

SEQ ID NO: 594 - RNA, 21 nt, synthetic construct
  source 1..21: mol_type = other RNA
  modified_base order(1,3,7,9,11,13,15,17,18,19,20): mod_base = OTHER; note = 2prime-O-methyl nucleosides
  modified_base order(2,4,5,6,8,10,12,14,16,21): mod_base = OTHER; note = 2prime-Fluoro nucleosides
  modified_base order(1..3,14..21): mod_base = OTHER; note = Phosphorothioate linkage
  modified_base 1: mod_base = OTHER; note = 5prime-(E)-Vinylphosphonate
tatagcatattaattggagtt

SEQ ID NO: 595 - RNA, 21 nt, synthetic construct
  source 1..21: mol_type = other RNA
  modified_base order(1,3,7,9,11,13,15,17,18,19,20): mod_base = OTHER; note = 2prime-O-methyl nucleosides
  modified_base order(2,4,5,6,8,10,12,14,16,21): mod_base = OTHER; note = 2prime-Fluoro nucleosides
  modified_base order(1..3,14..21): mod_base = OTHER; note = Phosphorothioate linkage
  modified_base 1: mod_base = OTHER; note = 5prime-(E)-Vinylphosphonate
taatatagcatattaattgtt

SEQ ID NO: 596 - RNA, 21 nt, synthetic construct
  source 1..21: mol_type = other RNA
  modified_base order(1,3,7,9,11,13,15,17,18,19,20): mod_base = OTHER; note = 2prime-O-methyl nucleosides
  modified_base order(2,4,5,6,8,10,12,14,16,21): mod_base = OTHER; note = 2prime-Fluoro nucleosides
  modified_base order(1..3,14..21): mod_base = OTHER; note = Phosphorothioate linkage
  modified_base 1: mod_base = OTHER; note = 5prime-(E)-Vinylphosphonate
tttatttgttctttgccattt

SEQ ID NO: 597 - RNA, 21 nt, synthetic construct
  source 1..21: mol_type = other RNA
  modified_base order(1,3,7,9,11,13,15,17,18,19,20): mod_base = OTHER; note = 2prime-O-methyl nucleosides
  modified_base order(2,4,5,6,8,10,12,14,16,21): mod_base = OTHER; note = 2prime-Fluoro nucleosides
  modified_base order(1..3,14..21): mod_base = OTHER; note = Phosphorothioate linkage
  modified_base 1: mod_base = OTHER; note = 5prime-(E)-Vinylphosphonate
tattatttgttctttgccatt

SEQ ID NO: 598 - RNA, 20 nt, synthetic construct
  source 1..20: mol_type = other RNA
  modified_base order(1,3,5,7,9,11,13,15,17,19): mod_base = OTHER; note = 2prime-O-methyl nucleosides
  modified_base order(2,4,6,8,10,12,14,16,18,20): mod_base = OTHER; note = 2prime-Fluoro nucleosides
  modified_base order(1..3,13..20): mod_base = OTHER; note = Phosphorothioate linkage
  modified_base 1: mod_base = OTHER; note = 5prime-(E)-Vinylphosphonate
ttattatttgttctttgcct

SEQ ID NO: 599 - RNA, 21 nt, synthetic construct
  source 1..21: mol_type = other RNA
  modified_base order(1,3,7,9,11,13,15,17,18,19,20): mod_base = OTHER; note = 2prime-O-methyl nucleosides
  modified_base order(2,4,5,6,8,10,12,14,16,21): mod_base = OTHER; note = 2prime-Fluoro nucleosides
  modified_base order(1..3,14..21): mod_base = OTHER; note = Phosphorothioate linkage
  modified_base 1: mod_base = OTHER; note = 5prime-(E)-Vinylphosphonate
tatactgtagcttatgctttt

SEQ ID NO: 600 - RNA, 21 nt, synthetic construct
  source 1..21: mol_type = other RNA
  modified_base order(1,3,7,9,11,13,15,17,18,19,20): mod_base = OTHER; note = 2prime-O-methyl nucleosides
  modified_base order(2,4,5,6,8,10,12,14,16,21): mod_base = OTHER; note = 2prime-Fluoro nucleosides
  modified_base order(1..3,14..21): mod_base = OTHER; note = Phosphorothioate linkage
  modified_base 1: mod_base = OTHER; note = 5prime-(E)-Vinylphosphonate
taaccattgcatatattcctt

SEQ ID NO: 601 - RNA, 21 nt, synthetic construct
  source 1..21: mol_type = other RNA
  modified_base order(1,3,7,9,11,13,15,17,18,19,20): mod_base = OTHER; note = 2prime-O-methyl nucleosides
  modified_base order(2,4,5,6,8,10,12,14,16,21): mod_base = OTHER; note = 2prime-Fluoro nucleosides
  modified_base order(1..3,14..21): mod_base = OTHER; note = Phosphorothioate linkage
  modified_base 1: mod_base = OTHER; note = 5prime-(E)-Vinylphosphonate
taaactctggaaatcataatt

SEQ ID NO: 602 - RNA, 21 nt, synthetic construct
  source 1..21: mol_type = other RNA
  modified_base order(1,3,7,9,11,13,15,17,18,19,20): mod_base = OTHER; note = 2prime-O-methyl nucleosides
  modified_base order(2,4,5,6,8,10,12,14,16,21): mod_base = OTHER; note = 2prime-Fluoro nucleosides
  modified_base order(1..3,14..21): mod_base = OTHER; note = Phosphorothioate linkage
  modified_base 1: mod_base = OTHER; note = 5prime-(E)-Vinylphosphonate
tgatctccttctagctcaatt

SEQ ID NO: 603 - RNA, 21 nt, synthetic construct
  source 1..21: mol_type = other RNA
  modified_base order(1,3,7,9,11,13,15,17,18,19,20): mod_base = OTHER; note = 2prime-O-methyl nucleosides
  modified_base order(2,4,5,6,8,10,12,14,16,21): mod_base = OTHER; note = 2prime-Fluoro nucleosides
  modified_base order(1..3,14..21): mod_base = OTHER; note = Phosphorothioate linkage
  modified_base 1: mod_base = OTHER; note = 5prime-(E)-Vinylphosphonate
ttgatctccttctagctcatt

SEQ ID NO: 604 - RNA, 21 nt, synthetic construct
  source 1..21: mol_type = other RNA
  modified_base order(1,3,7,9,11,13,15,17,18,19,20): mod_base = OTHER; note = 2prime-O-methyl nucleosides
  modified_base order(2,4,5,6,8,10,12,14,16,21): mod_base = OTHER; note = 2prime-Fluoro nucleosides
  modified_base order(1..3,14..21): mod_base = OTHER; note = Phosphorothioate linkage
  modified_base 1: mod_base = OTHER; note = 5prime-(E)-Vinylphosphonate
tataaatgtaatttgatcttt

SEQ ID NO: 605 - RNA, 21 nt, synthetic construct
  source 1..21: mol_type = other RNA
  modified_base order(1,3,7,9,11,13,15,17,18,19,20): mod_base = OTHER; note = 2prime-O-methyl nucleosides
  modified_base order(2,4,5,6,8,10,12,14,16,21): mod_base = OTHER; note = 2prime-Fluoro nucleosides
  modified_base order(1..3,14..21): mod_base = OTHER; note = Phosphorothioate linkage
  modified_base 1: mod_base = OTHER; note = 5prime-(E)-Vinylphosphonate
taacataaatgtaatttgatt

SEQ ID NO: 606 - RNA, 21 nt, synthetic construct
  source 1..21: mol_type = other RNA
  modified_base order(1,3,7,9,11,13,15,17,18,19,20): mod_base = OTHER; note = 2prime-O-methyl nucleosides
  modified_base order(2,4,5,6,8,10,12,14,16,21): mod_base = OTHER; note = 2prime-Fluoro nucleosides
  modified_base order(1..3,14..21): mod_base = OTHER; note = Phosphorothioate linkage
  modified_base 1: mod_base = OTHER; note = 5prime-(E)-Vinylphosphonate
tggaacataaatgtaattttt

SEQ ID NO: 607 - RNA, 21 nt, synthetic construct
  source 1..21: mol_type = other RNA
  modified_base order(1,3,7,9,11,13,15,17,18,19,20): mod_base = OTHER; note = 2prime-O-methyl nucleosides
  modified_base order(2,4,5,6,8,10,12,14,16,21): mod_base = OTHER; note = 2prime-Fluoro nucleosides
  modified_base order(1..3,14..21): mod_base = OTHER; note = Phosphorothioate linkage
  modified_base 1: mod_base = OTHER; note = 5prime-(E)-Vinylphosphonate
ttaggaacataaatgtaattt

SEQ ID NO: 608 - RNA, 21 nt, synthetic construct
  source 1..21: mol_type = other RNA
  modified_base order(1,3,7,9,11,13,15,17,18,19,20): mod_base = OTHER; note = 2prime-O-methyl nucleosides
  modified_base order(2,4,5,6,8,10,12,14,16,21): mod_base = OTHER; note = 2prime-Fluoro nucleosides
  modified_base order(1..3,14..21): mod_base = OTHER; note = Phosphorothioate linkage
  modified_base 1: mod_base = OTHER; note = 5prime-(E)-Vinylphosphonate
tgatgttgtaatatataggtt

SEQ ID NO: 609 - RNA, 21 nt, synthetic construct
  source 1..21: mol_type = other RNA
  modified_base order(1,3,7,9,11,13,15,17,18,19,20): mod_base = OTHER; note = 2prime-O-methyl nucleosides
  modified_base order(2,4,5,6,8,10,12,14,16,21): mod_base = OTHER; note = 2prime-Fluoro nucleosides
  modified_base order(1..3,14..21): mod_base = OTHER; note = Phosphorothioate linkage
  modified_base 1: mod_base = OTHER; note = 5prime-(E)-Vinylphosphonate
tgaatcgctttcatttccttt

SEQ ID NO: 610 - RNA, 21 nt, synthetic construct
  source 1..21: mol_type = other RNA
  modified_base order(1,3,7,9,11,13,15,17,18,19,20): mod_base = OTHER; note = 2prime-O-methyl nucleosides
  modified_base order(2,4,5,6,8,10,12,14,16,21): mod_base = OTHER; note = 2prime-Fluoro nucleosides
  modified_base order(1..3,14..21): mod_base = OTHER; note = Phosphorothioate linkage
  modified_base 1: mod_base = OTHER; note = 5prime-(E)-Vinylphosphonate
tatactcctttaattcatctt

SEQ ID NO: 611 - RNA, 21 nt, synthetic construct
  source 1..21: mol_type = other RNA
  modified_base order(1,3,7,9,11,13,15,17,18,19,20): mod_base = OTHER; note = 2prime-O-methyl nucleosides
  modified_base order(2,4,5,6,8,10,12,14,16,21): mod_base = OTHER; note = 2prime-Fluoro nucleosides
  modified_base order(1..3,14..21): mod_base = OTHER; note = Phosphorothioate linkage
  modified_base 1: mod_base = OTHER; note = 5prime-(E)-Vinylphosphonate
taatagactttaaagcatatt

SEQ ID NO: 612 - RNA, 21 nt, synthetic construct
  source 1..21: mol_type = other RNA
  modified_base order(1,3,7,9,11,13,15,17,18,19,20): mod_base = OTHER; note = 2prime-O-methyl nucleosides
  modified_base order(2,4,5,6,8,10,12,14,16,21): mod_base = OTHER; note = 2prime-Fluoro nucleosides
  modified_base order(1..3,14..21): mod_base = OTHER; note = Phosphorothioate linkage
  modified_base 1: mod_base = OTHER; note = 5prime-(E)-Vinylphosphonate
ttaaagaaatagactttaatt

SEQ ID NO: 613 - RNA, 21 nt, synthetic construct
  source 1..21: mol_type = other RNA
  modified_base order(1,3,7,9,11,13,15,17,18,19,20): mod_base = OTHER; note = 2prime-O-methyl nucleosides
  modified_base order(2,4,5,6,8,10,12,14,16,21): mod_base = OTHER; note = 2prime-Fluoro nucleosides
  modified_base order(1..3,14..21): mod_base = OTHER; note = Phosphorothioate linkage
  modified_base 1: mod_base = OTHER; note = 5prime-(E)-Vinylphosphonate
taaactttaaagaaatagatt

SEQ ID NO: 614 - RNA, 21 nt, synthetic construct
  source 1..21: mol_type = other RNA
  modified_base order(1,3,7,9,11,13,15,17,18,19,20): mod_base = OTHER; note = 2prime-O-methyl nucleosides
  modified_base order(2,4,5,6,8,10,12,14,16,21): mod_base = OTHER; note = 2prime-Fluoro nucleosides
  modified_base order(1..3,14..21): mod_base = OTHER; note = Phosphorothioate linkage
  modified_base 1: mod_base = OTHER; note = 5prime-(E)-Vinylphosphonate
taatgatggtatataacaatt

SEQ ID NO: 615 - RNA, 21 nt, synthetic construct
  source 1..21: mol_type = other RNA
  modified_base order(1,3,7,9,11,13,15,17,18,19,20): mod_base = OTHER; note = 2prime-O-methyl nucleosides
  modified_base order(2,4,5,6,8,10,12,14,16,21): mod_base = OTHER; note = 2prime-Fluoro nucleosides
  modified_base order(1..3,14..21): mod_base = OTHER; note = Phosphorothioate linkage
  modified_base 1: mod_base = OTHER; note = 5prime-(E)-Vinylphosphonate
taatgcagaaatatattcatt

SEQ ID NO: 616 - RNA, 21 nt, synthetic construct
  source 1..21: mol_type = other RNA
  modified_base order(1,3,7,9,11,13,15,17,18,19,20): mod_base = OTHER; note = 2prime-O-methyl nucleosides
  modified_base order(2,4,5,6,8,10,12,14,16,21): mod_base = OTHER; note = 2prime-Fluoro nucleosides
  modified_base order(1..3,14..21): mod_base = OTHER; note = Phosphorothioate linkage
  modified_base 1: mod_base = OTHER; note = 5prime-(E)-Vinylphosphonate
tagtgtttaaggatgattctt

SEQ ID NO: 617 - RNA, 21 nt, synthetic construct
  source 1..21: mol_type = other RNA
  modified_base order(1,3,7,9,11,13,15,17,18,19,20): mod_base = OTHER; note = 2prime-O-methyl nucleosides
  modified_base order(2,4,5,6,8,10,12,14,16,21): mod_base = OTHER; note = 2prime-Fluoro nucleosides
  modified_base order(1..3,14..21): mod_base = OTHER; note = Phosphorothioate linkage
  modified_base 1: mod_base = OTHER; note = 5prime-(E)-Vinylphosphonate
tataaattcaagtgtttaatt

SEQ ID NO: 618 - RNA, 21 nt, synthetic construct
  source 1..21: mol_type = other RNA
  modified_base order(1,3,7,9,11,13,15,17,18,19,20): mod_base = OTHER; note = 2prime-O-methyl nucleosides
  modified_base order(2,4,5,6,8,10,12,14,16,21): mod_base = OTHER; note = 2prime-Fluoro nucleosides
  modified_base order(1..3,14..21): mod_base = OTHER; note = Phosphorothioate linkage
  modified_base 1: mod_base = OTHER; note = 5prime-(E)-Vinylphosphonate
taatataaattcaagtgtttt

SEQ ID NO: 619 - RNA, 21 nt, synthetic construct
  source 1..21: mol_type = other RNA
  modified_base order(1,3,7,9,11,13,15,17,18,19,20): mod_base = OTHER; note = 2prime-O-methyl nucleosides
  modified_base order(2,4,5,6,8,10,12,14,16,21): mod_base = OTHER; note = 2prime-Fluoro nucleosides
  modified_base order(1..3,14..21): mod_base = OTHER; note = Phosphorothioate linkage
  modified_base 1: mod_base = OTHER; note = 5prime-(E)-Vinylphosphonate
tatacaatataaattcaagtt

SEQ ID NO: 620 - RNA, 21 nt, synthetic construct
  source 1..21: mol_type = other RNA
  modified_base order(1,3,7,9,11,13,15,17,18,19,20): mod_base = OTHER; note = 2prime-O-methyl nucleosides
  modified_base order(2,4,5,6,8,10,12,14,16,21): mod_base = OTHER; note = 2prime-Fluoro nucleosides
  modified_base order(1..3,14..21): mod_base = OTHER; note = Phosphorothioate linkage
  modified_base 1: mod_base = OTHER; note = 5prime-(E)-Vinylphosphonate
tcatatgctgcaccatccctt

SEQ ID NO: 621 - RNA, 21 nt, synthetic construct
  source 1..21: mol_type = other RNA
  modified_base order(1,3,7,9,11,13,15,17,18,19,20): mod_base = OTHER; note = 2prime-O-methyl nucleosides
  modified_base order(2,4,5,6,8,10,12,14,16,21): mod_base = OTHER; note = 2prime-Fluoro nucleosides
  modified_base order(1..3,14..21): mod_base = OTHER; note = Phosphorothioate linkage
  modified_base 1: mod_base = OTHER; note = 5prime-(E)-Vinylphosphonate
tggaaattgcatatgctgctt

SEQ ID NO: 622 - RNA, 21 nt, synthetic construct
  source 1..21: mol_type = other RNA
  modified_base order(1,3,7,9,11,13,15,17,18,19,20): mod_base = OTHER; note = 2prime-O-methyl nucleosides
  modified_base order(2,4,5,6,8,10,12,14,16,21): mod_base = OTHER; note = 2prime-Fluoro nucleosides
  modified_base order(1..3,14..21): mod_base = OTHER; note = Phosphorothioate linkage
  modified_base 1: mod_base = OTHER; note = 5prime-(E)-Vinylphosphonate
taagataatgcagtttctctt

SEQ ID NO: 623 - RNA, 21 nt, synthetic construct
  source 1..21: mol_type = other RNA
  modified_base order(1,3,7,9,11,13,15,17,18,19,20): mod_base = OTHER; note = 2prime-O-methyl nucleosides
  modified_base order(2,4,5,6,8,10,12,14,16,21): mod_base = OTHER; note = 2prime-Fluoro nucleosides
  modified_base order(1..3,14..21): mod_base = OTHER; note = Phosphorothioate linkage
  modified_base 1: mod_base = OTHER; note = 5prime-(E)-Vinylphosphonate
taaattacatacttctccatt

SEQ ID NO: 624 - RNA, 21 nt, synthetic construct
  source 1..21: mol_type = other RNA
  modified_base order(1,3,7,9,11,13,15,17,18,19,20): mod_base = OTHER; note = 2prime-O-methyl nucleosides
  modified_base order(2,4,5,6,8,10,12,14,16,21): mod_base = OTHER; note = 2prime-Fluoro nucleosides
  modified_base order(1..3,14..21): mod_base = OTHER; note = Phosphorothioate linkage
  modified_base 1: mod_base = OTHER; note = 5prime-(E)-Vinylphosphonate
tgcagtgttgcaaaggcagtt

SEQ ID NO: 625 - RNA, 21 nt, synthetic construct
  source 1..21: mol_type = other RNA
  modified_base order(1,3,7,9,11,13,15,17,18,19,20): mod_base = OTHER; note = 2prime-O-methyl nucleosides
  modified_base order(2,4,5,6,8,10,12,14,16,21): mod_base = OTHER; note = 2prime-Fluoro nucleosides
  modified_base order(1..3,14..21): mod_base = OTHER; note = Phosphorothioate linkage
  modified_base 1: mod_base = OTHER; note = 5prime-(E)-Vinylphosphonate
taaactgcagtgttgcaaatt

SEQ ID NO: 626 - RNA, 21 nt, synthetic construct
  source 1..21: mol_type = other RNA
  modified_base order(1,3,7,9,11,13,15,17,18,19,20): mod_base = OTHER; note = 2prime-O-methyl nucleosides
  modified_base order(2,4,5,6,8,10,12,14,16,21): mod_base = OTHER; note = 2prime-Fluoro nucleosides
  modified_base order(1..3,14..21): mod_base = OTHER; note = Phosphorothioate linkage
  modified_base 1: mod_base = OTHER; note = 5prime-(E)-Vinylphosphonate
tagagtcgatcatttctattt

SEQ ID NO: 627 - RNA, 21 nt, synthetic construct
  source 1..21: mol_type = other RNA
  modified_base order(1,3,7,9,11,13,15,17,18,19,20): mod_base = OTHER; note = 2prime-O-methyl nucleosides
  modified_base order(2,4,5,6,8,10,12,14,16,21): mod_base = OTHER; note = 2prime-Fluoro nucleosides
  modified_base order(1..3,14..21): mod_base = OTHER; note = Phosphorothioate linkage
  modified_base 1: mod_base = OTHER; note = 5prime-(E)-Vinylphosphonate
ttagagtcgatcatttctatt

SEQ ID NO: 628 - RNA, 21 nt, synthetic construct
  source 1..21: mol_type = other RNA
  modified_base order(1,3,7,9,11,13,15,17,18,19,20): mod_base = OTHER; note = 2prime-O-methyl nucleosides
  modified_base order(2,4,5,6,8,10,12,14,16,21): mod_base = OTHER; note = 2prime-Fluoro nucleosides
  modified_base order(1..3,14..21): mod_base = OTHER; note = Phosphorothioate linkage
  modified_base 1: mod_base = OTHER; note = 5prime-(E)-Vinylphosphonate
taatattgatagagtcgattt

SEQ ID NO: 629 - RNA, 21 nt, synthetic construct
  source 1..21: mol_type = other RNA
  modified_base order(1,3,7,9,11,13,15,17,18,19,20): mod_base = OTHER; note = 2prime-O-methyl nucleosides
  modified_base order(2,4,5,6,8,10,12,14,16,21): mod_base = OTHER; note = 2prime-Fluoro nucleosides
  modified_base order(1..3,14..21): mod_base = OTHER; note = Phosphorothioate linkage
  modified_base 1: mod_base = OTHER; note = 5prime-(E)-Vinylphosphonate
tatacaatattgatagagttt

SEQ ID NO: 630 - RNA, 21 nt, synthetic construct
  source 1..21: mol_type = other RNA
  modified_base order(1,3,7,9,11,13,15,17,18,19,20): mod_base = OTHER; note = 2prime-O-methyl nucleosides
  modified_base order(2,4,5,6,8,10,12,14,16,21): mod_base = OTHER; note = 2prime-Fluoro nucleosides
  modified_base order(1..3,14..21): mod_base = OTHER; note = Phosphorothioate linkage
  modified_base 1: mod_base = OTHER; note = 5prime-(E)-Vinylphosphonate
ttgcattgtttcagtcttttt

SEQ ID NO: 631 - RNA, 21 nt, synthetic construct
  source 1..21: mol_type = other RNA
  modified_base order(1,3,7,9,11,13,15,17,18,19,20): mod_base = OTHER; note = 2prime-O-methyl nucleosides
  modified_base order(2,4,5,6,8,10,12,14,16,21): mod_base = OTHER; note = 2prime-Fluoro nucleosides
  modified_base order(1..3,14..21): mod_base = OTHER; note = Phosphorothioate linkage
  modified_base 1: mod_base = OTHER; note = 5prime-(E)-Vinylphosphonate
tataaatgcattgtttcagtt

SEQ ID NO: 632 - RNA, 21 nt, synthetic construct
  source 1..21: mol_type = other RNA
  modified_base order(1,3,7,9,11,13,15,17,18,19,20): mod_base = OTHER; note = 2prime-O-methyl nucleosides
  modified_base order(2,4,5,6,8,10,12,14,16,21): mod_base = OTHER; note = 2prime-Fluoro nucleosides
  modified_base order(1..3,14..21): mod_base = OTHER; note = Phosphorothioate linkage
  modified_base 1: mod_base = OTHER; note = 5prime-(E)-Vinylphosphonate
tatataaatgcattgtttctt

SEQ ID NO: 633 - RNA, 21 nt, synthetic construct
  source 1..21: mol_type = other RNA
  modified_base order(1,3,7,9,11,13,15,17,18,19,20): mod_base = OTHER; note = 2prime-O-methyl nucleosides
  modified_base order(2,4,5,6,8,10,12,14,16,21): mod_base = OTHER; note = 2prime-Fluoro nucleosides
  modified_base order(1..3,14..21): mod_base = OTHER; note = Phosphorothioate linkage
  modified_base 1: mod_base = OTHER; note = 5prime-(E)-Vinylphosphonate
ttatataaatgcattgttttt

SEQ ID NO: 634 - RNA, 21 nt, synthetic construct
  source 1..21: mol_type = other RNA
  modified_base order(1,3,7,9,11,13,15,17,18,19,20): mod_base = OTHER; note = 2prime-O-methyl nucleosides
  modified_base order(2,4,5,6,8,10,12,14,16,21): mod_base = OTHER; note = 2prime-Fluoro nucleosides
  modified_base order(1..3,14..21): mod_base = OTHER; note = Phosphorothioate linkage
  modified_base 1: mod_base = OTHER; note = 5prime-(E)-Vinylphosphonate
tattgtatacatattatattt

SEQ ID NO: 635 - RNA, 21 nt, synthetic construct
  source 1..21: mol_type = other RNA
  modified_base order(1,3,7,9,11,13,15,17,18,19,20): mod_base = OTHER; note = 2prime-O-methyl nucleosides
  modified_base order(2,4,5,6,8,10,12,14,16,21): mod_base = OTHER; note = 2prime-Fluoro nucleosides
  modified_base order(1..3,14..21): mod_base = OTHER; note = Phosphorothioate linkage
  modified_base 1: mod_base = OTHER; note = 5prime-(E)-Vinylphosphonate
taatattgtatacatattatt

SEQ ID NO: 636 - RNA, 21 nt, synthetic construct
  source 1..21: mol_type = other RNA
  modified_base order(1,3,7,9,11,13,15,17,18,19,20): mod_base = OTHER; note = 2prime-O-methyl nucleosides
  modified_base order(2,4,5,6,8,10,12,14,16,21): mod_base = OTHER; note = 2prime-Fluoro nucleosides
  modified_base order(1..3,14..21): mod_base = OTHER; note = Phosphorothioate linkage
  modified_base 1: mod_base = OTHER; note = 5prime-(E)-Vinylphosphonate
taaacaatattgtatacattt

SEQ ID NO: 637 - RNA, 21 nt, synthetic construct
  source 1..21: mol_type = other RNA
  modified_base order(1,3,7,9,11,13,15,17,18,19,20): mod_base = OTHER; note = 2prime-O-methyl nucleosides
  modified_base order(2,4,5,6,8,10,12,14,16,21): mod_base = OTHER; note = 2prime-Fluoro nucleosides
  modified_base order(1..3,14..21): mod_base = OTHER; note = Phosphorothioate linkage
  modified_base 1: mod_base = OTHER; note = 5prime-(E)-Vinylphosphonate
tgacacttatttacaaaactt

SEQ ID NO: 638 - RNA, 21 nt, synthetic construct
  source 1..21: mol_type = other RNA
  modified_base order(1,3,7,9,11,13,15,17,18,19,20): mod_base = OTHER; note = 2prime-O-methyl nucleosides
  modified_base order(2,4,5,6,8,10,12,14,16,21): mod_base = OTHER; note = 2prime-Fluoro nucleosides
  modified_base order(1..3,14..21): mod_base = OTHER; note = Phosphorothioate linkage
  modified_base 1: mod_base = OTHER; note = 5prime-(E)-Vinylphosphonate
tgagacacttatttacaaatt

SEQ ID NO: 639 - RNA, 21 nt, synthetic construct
  source 1..21: mol_type = other RNA
  modified_base order(1,3,7,9,11,13,15,17,18,19,20): mod_base = OTHER; note = 2prime-O-methyl nucleosides
  modified_base order(2,4,5,6,8,10,12,14,16,21): mod_base = OTHER; note = 2prime-Fluoro nucleosides
  modified_base order(1..3,14..21): mod_base = OTHER; note = Phosphorothioate linkage
  modified_base 1: mod_base = OTHER; note = 5prime-(E)-Vinylphosphonate
tggagacacttatttacaatt

SEQ ID NO: 640 - RNA, 21 nt, synthetic construct
  source 1..21: mol_type = other RNA
  modified_base order(1,3,7,9,11,13,15,17,18,19,20): mod_base = OTHER; note = 2prime-O-methyl nucleosides
  modified_base order(2,4,5,6,8,10,12,14,16,21): mod_base = OTHER; note = 2prime-Fluoro nucleosides
  modified_base order(1..3,14..21): mod_base = OTHER; note = Phosphorothioate linkage
  modified_base 1: mod_base = OTHER; note = 5prime-(E)-Vinylphosphonate
taggagacacttatttacatt

SEQ ID NO: 641 - RNA, 21 nt, synthetic construct
  source 1..21: mol_type = other RNA
  modified_base order(1,3,7,9,11,13,15,17,18,19,20): mod_base = OTHER; note = 2prime-O-methyl nucleosides
  modified_base order(2,4,5,6,8,10,12,14,16,21): mod_base = OTHER; note = 2prime-Fluoro nucleosides
  modified_base order(1..3,14..21): mod_base = OTHER; note = Phosphorothioate linkage
  modified_base 1: mod_base = OTHER; note = 5prime-(E)-Vinylphosphonate
taaatgtccttagtgtaaatt

SEQ ID NO: 642 - RNA, 21 nt, synthetic construct
  source 1..21: mol_type = other RNA
  modified_base order(1,3,7,9,11,13,15,17,18,19,20): mod_base = OTHER; note = 2prime-O-methyl nucleosides
  modified_base order(2,4,5,6,8,10,12,14,16,21): mod_base = OTHER; note = 2prime-Fluoro nucleosides
  modified_base order(1..3,14..21): mod_base = OTHER; note = Phosphorothioate linkage
  modified_base 1: mod_base = OTHER; note = 5prime-(E)-Vinylphosphonate
ttgaaatgtccttagtgtatt

SEQ ID NO: 643 - RNA, 21 nt, synthetic construct
  source 1..21: mol_type = other RNA
  modified_base order(1,3,7,9,11,13,15,17,18,19,20): mod_base = OTHER; note = 2prime-O-methyl nucleosides
  modified_base order(2,4,5,6,8,10,12,14,16,21): mod_base = OTHER; note = 2prime-Fluoro nucleosides
  modified_base order(1..3,14..21): mod_base = OTHER; note = Phosphorothioate linkage
  modified_base 1: mod_base = OTHER; note = 5prime-(E)-Vinylphosphonate
tcttaatttgaaatgtccttt

SEQ ID NO: 644 - RNA, 21 nt, synthetic construct
  source 1..21: mol_type = other RNA
  modified_base order(1,3,7,9,11,13,15,17,18,19,20): mod_base = OTHER; note = 2prime-O-methyl nucleosides
  modified_base order(2,4,5,6,8,10,12,14,16,21): mod_base = OTHER; note = 2prime-Fluoro nucleosides
  modified_base order(1..3,14..21): mod_base = OTHER; note = Phosphorothioate linkage
  modified_base 1: mod_base = OTHER; note = 5prime-(E)-Vinylphosphonate
tcactatttaatctgctaatt

SEQ ID NO: 645 - RNA, 21 nt, synthetic construct
  source 1..21: mol_type = other RNA
  modified_base order(1,3,7,9,11,13,15,17,18,19,20): mod_base = OTHER; note = 2prime-O-methyl nucleosides
  modified_base order(2,4,5,6,8,10,12,14,16,21): mod_base = OTHER; note = 2prime-Fluoro nucleosides
  modified_base order(1..3,14..21): mod_base = OTHER; note = Phosphorothioate linkage
  modified_base 1: mod_base = OTHER; note = 5prime-(E)-Vinylphosphonate
tccactatttaatctgctatt

SEQ ID NO: 646 - RNA, 21 nt, synthetic construct
  source 1..21: mol_type = other RNA
  modified_base order(1,3,7,9,11,13,15,17,18,19,20): mod_base = OTHER; note = 2prime-O-methyl nucleosides
  modified_base order(2,4,5,6,8,10,12,14,16,21): mod_base = OTHER; note = 2prime-Fluoro nucleosides
  modified_base order(1..3,14..21): mod_base = OTHER; note = Phosphorothioate linkage
  modified_base 1: mod_base = OTHER; note = 5prime-(E)-Vinylphosphonate
taccactatttaatctgcttt

SEQ ID NO: 647 - RNA, 21 nt, synthetic construct
  source 1..21: mol_type = other RNA
  modified_base order(1,3,7,9,11,13,15,17,18,19,20): mod_base = OTHER; note = 2prime-O-methyl nucleosides
  modified_base order(2,4,5,6,8,10,12,14,16,21): mod_base = OTHER; note = 2prime-Fluoro nucleosides
  modified_base order(1..3,14..21): mod_base = OTHER; note = Phosphorothioate linkage
  modified_base 1: mod_base = OTHER; note = 5prime-(E)-Vinylphosphonate
taccatctaatcattaacatt

SEQ ID NO: 648 - RNA, 21 nt, synthetic construct
  source 1..21: mol_type = other RNA
  modified_base order(1,3,7,9,11,13,15,17,18,19,20): mod_base = OTHER; note = 2prime-O-methyl nucleosides
  modified_base order(2,4,5,6,8,10,12,14,16,21): mod_base = OTHER; note = 2prime-Fluoro nucleosides
  modified_base order(1..3,14..21): mod_base = OTHER; note = Phosphorothioate linkage
  modified_base 1: mod_base = OTHER; note = 5prime-(E)-Vinylphosphonate
ttgtaatataaccatctaatt

SEQ ID NO: 649 - RNA, 21 nt, synthetic construct
  source 1..21: mol_type = other RNA
  modified_base order(1,3,7,9,11,13,15,17,18,19,20): mod_base = OTHER; note = 2prime-O-methyl nucleosides
  modified_base order(2,4,5,6,8,10,12,14,16,21): mod_base = OTHER; note = 2prime-Fluoro nucleosides
  modified_base order(1..3,14..21): mod_base = OTHER; note = Phosphorothioate linkage
  modified_base 1: mod_base = OTHER; note = 5prime-(E)-Vinylphosphonate
tatgattgtaatataaccatt

SEQ ID NO: 650 - RNA, 21 nt, synthetic construct
  source 1..21: mol_type = other RNA
  modified_base order(1,3,7,9,11,13,15,17,18,19,20): mod_base = OTHER; note = 2prime-O-methyl nucleosides
  modified_base order(2,4,5,6,8,10,12,14,16,21): mod_base = OTHER; note = 2prime-Fluoro nucleosides
  modified_base order(1..3,14..21): mod_base = OTHER; note = Phosphorothioate linkage
  modified_base 1: mod_base = OTHER; note = 5prime-(E)-Vinylphosphonate
tgaatgttaatcatgtaaatt

SEQ ID NO: 651 - RNA, 21 nt, synthetic construct
  source 1..21: mol_type = other RNA
  modified_base order(1,3,7,9,11,13,15,17,18,19,20): mod_base = OTHER; note = 2prime-O-methyl nucleosides
  modified_base order(2,4,5,6,8,10,12,14,16,21): mod_base = OTHER; note = 2prime-Fluoro nucleosides
  modified_base order(1..3,14..21): mod_base = OTHER; note = Phosphorothioate linkage
  modified_base 1: mod_base = OTHER; note = 5prime-(E)-Vinylphosphonate
ttgaatgttaatcatgtaatt

SEQ ID NO: 652 - RNA, 21 nt, synthetic construct
  source 1..21: mol_type = other RNA
  modified_base order(1,3,7,9,11,13,15,17,18,19,20): mod_base = OTHER; note = 2prime-O-methyl nucleosides
  modified_base order(2,4,5,6,8,10,12,14,16,21): mod_base = OTHER; note = 2prime-Fluoro nucleosides
  modified_base order(1..3,14..21): mod_base = OTHER; note = Phosphorothioate linkage
  modified_base 1: mod_base = OTHER; note = 5prime-(E)-Vinylphosphonate
taaattcactttatacagctt

SEQ ID NO: 653 - RNA, 21 nt, synthetic construct
  source 1..21: mol_type = other RNA
  modified_base order(1,3,7,9,11,13,15,17,18,19,20): mod_base = OTHER; note = 2prime-O-methyl nucleosides
  modified_base order(2,4,5,6,8,10,12,14,16,21): mod_base = OTHER; note = 2prime-Fluoro nucleosides
  modified_base order(1..3,14..21): mod_base = OTHER; note = Phosphorothioate linkage
  modified_base 1: mod_base = OTHER; note = 5prime-(E)-Vinylphosphonate
taaaccattgaaatttcaatt

SEQ ID NO: 654 - RNA, 21 nt, synthetic construct
  source 1..21: mol_type = other RNA
  modified_base order(1,3,7,9,11,13,15,17,18,19,20): mod_base = OTHER; note = 2prime-O-methyl nucleosides
  modified_base order(2,4,5,6,8,10,12,14,16,21): mod_base = OTHER; note = 2prime-Fluoro nucleosides
  modified_base order(1..3,14..21): mod_base = OTHER; note = Phosphorothioate linkage
  modified_base 1: mod_base = OTHER; note = 5prime-(E)-Vinylphosphonate
tgtaaaccattgaaatttctt

SEQ ID NO: 655 - RNA, 21 nt, synthetic construct
  source 1..21: mol_type = other RNA
  modified_base order(1,3,7,9,11,13,15,17,18,19,20): mod_base = OTHER; note = 2prime-O-methyl nucleosides
  modified_base order(2,4,5,6,8,10,12,14,16,21): mod_base = OTHER; note = 2prime-Fluoro nucleosides
  modified_base order(1..3,14..21): mod_base = OTHER; note = Phosphorothioate linkage
  modified_base 1: mod_base = OTHER; note = 5prime-(E)-Vinylphosphonate
tgagatttaaacacaatgatt

SEQ ID NO: 656 - RNA, 21 nt, synthetic construct
  source 1..21: mol_type = other RNA
  modified_base order(1,3,7,9,11,13,15,17,18,19,20): mod_base = OTHER; note = 2prime-O-methyl nucleosides
  modified_base order(2,4,5,6,8,10,12,14,16,21): mod_base = OTHER; note = 2prime-Fluoro nucleosides
  modified_base order(1..3,14..21): mod_base = OTHER; note = Phosphorothioate linkage
  modified_base 1: mod_base = OTHER; note = 5prime-(E)-Vinylphosphonate
taacgttgagatttaaacatt

SEQ ID NO: 657 - RNA, 21 nt, synthetic construct
  source 1..21: mol_type = other RNA
  modified_base order(1,3,7,9,11,13,15,17,18,19,20): mod_base = OTHER; note = 2prime-O-methyl nucleosides
  modified_base order(2,4,5,6,8,10,12,14,16,21): mod_base = OTHER; note = 2prime-Fluoro nucleosides
  modified_base order(1..3,14..21): mod_base = OTHER; note = Phosphorothioate linkage
  modified_base 1: mod_base = OTHER; note = 5prime-(E)-Vinylphosphonate
tggaacgttgagatttaaatt

SEQ ID NO: 658 - RNA, 21 nt, synthetic construct
  source 1..21: mol_type = other RNA
  modified_base order(1,3,7,9,11,13,15,17,18,19,20): mod_base = OTHER; note = 2prime-O-methyl nucleosides
  modified_base order(2,4,5,6,8,10,12,14,16,21): mod_base = OTHER; note = 2prime-Fluoro nucleosides
  modified_base order(1..3,14..21): mod_base = OTHER; note = Phosphorothioate linkage
  modified_base 1: mod_base = OTHER; note = 5prime-(E)-Vinylphosphonate
tgagatagcatcagtttattt

SEQ ID NO: 659 - RNA, 21 nt, synthetic construct
  source 1..21: mol_type = other RNA
  modified_base order(1,3,7,9,11,13,15,17,18,19,20): mod_base = OTHER; note = 2prime-O-methyl nucleosides
  modified_base order(2,4,5,6,8,10,12,14,16,21): mod_base = OTHER; note = 2prime-Fluoro nucleosides
  modified_base order(1..3,14..21): mod_base = OTHER; note = Phosphorothioate linkage
  modified_base 1: mod_base = OTHER; note = 5prime-(E)-Vinylphosphonate
taacagttattgttgagattt

SEQ ID NO: 660 - RNA, 21 nt, synthetic construct
  source 1..21: mol_type = other RNA
  modified_base order(1,3,7,9,11,13,15,17,18,19,20): mod_base = OTHER; note = 2prime-O-methyl nucleosides
  modified_base order(2,4,5,6,8,10,12,14,16,21): mod_base = OTHER; note = 2prime-Fluoro nucleosides
  modified_base order(1..3,14..21): mod_base = OTHER; note = Phosphorothioate linkage
  modified_base 1: mod_base = OTHER; note = 5prime-(E)-Vinylphosphonate
ttaacagttattgttgagatt

SEQ ID NO: 661 - RNA, 21 nt, synthetic construct
  source 1..21: mol_type = other RNA
  modified_base order(1,3,7,9,11,13,15,17,18,19,20): mod_base = OTHER; note = 2prime-O-methyl nucleosides
  modified_base order(2,4,5,6,8,10,12,14,16,21): mod_base = OTHER; note = 2prime-Fluoro nucleosides
  modified_base order(1..3,14..21): mod_base = OTHER; note = Phosphorothioate linkage
  modified_base 1: mod_base = OTHER; note = 5prime-(E)-Vinylphosphonate
tttcattatcaaattataatt

SEQ ID NO: 662 - RNA, 21 nt, synthetic construct
  source 1..21: mol_type = other RNA
  modified_base order(1,3,7,9,11,13,15,17,18,19,20): mod_base = OTHER; note = 2prime-O-methyl nucleosides
  modified_base order(2,4,5,6,8,10,12,14,16,21): mod_base = OTHER; note = 2prime-Fluoro nucleosides
  modified_base order(1..3,14..21): mod_base = OTHER; note = Phosphorothioate linkage
  modified_base 1: mod_base = OTHER; note = 5prime-(E)-Vinylphosphonate
tgaaatatattcattatcatt

SEQ ID NO: 663 - RNA, 21 nt, synthetic construct
  source 1..21: mol_type = other RNA
  modified_base order(1,3,7,9,11,13,15,17,18,19,20): mod_base = OTHER; note = 2prime-O-methyl nucleosides
  modified_base order(2,4,5,6,8,10,12,14,16,21): mod_base = OTHER; note = 2prime-Fluoro nucleosides
  modified_base order(1..3,14..21): mod_base = OTHER; note = Phosphorothioate linkage
  modified_base 1: mod_base = OTHER; note = 5prime-(E)-Vinylphosphonate
tagaaatatattcattatctt

SEQ ID NO: 664 - RNA, 21 nt, synthetic construct
  source 1..21: mol_type = other RNA
  modified_base order(1,3,7,9,11,13,15,17,18,19,20): mod_base = OTHER; note = 2prime-O-methyl nucleosides
  modified_base order(2,4,5,6,8,10,12,14,16,21): mod_base = OTHER; note = 2prime-Fluoro nucleosides
  modified_base order(1..3,14..21): mod_base = OTHER; note = Phosphorothioate linkage
  modified_base 1: mod_base = OTHER; note = 5prime-(E)-Vinylphosphonate
ttgcagaaatatattcatttt

SEQ ID NO: 665 - RNA, 21 nt, synthetic construct
  source 1..21: mol_type = other RNA
  modified_base order(1,3,7,9,11,13,15,17,18,19,20): mod_base = OTHER; note = 2prime-O-methyl nucleosides
  modified_base order(2,4,5,6,8,10,12,14,16,21): mod_base = OTHER; note = 2prime-Fluoro nucleosides
  modified_base order(1..3,14..21): mod_base = OTHER; note = Phosphorothioate linkage
  modified_base 1: mod_base = OTHER; note = 5prime-(E)-Vinylphosphonate
tagtaaataaatgcagaaatt

SEQ ID NO: 666 - RNA, 21 nt, synthetic construct
  source 1..21: mol_type = other RNA
  modified_base order(1,3,7,9,11,13,15,17,18,19,20): mod_base = OTHER; note = 2prime-O-methyl nucleosides
  modified_base order(2,4,5,6,8,10,12,14,16,21): mod_base = OTHER; note = 2prime-Fluoro nucleosides
  modified_base order(1..3,14..21): mod_base = OTHER; note = Phosphorothioate linkage
  modified_base 1: mod_base = OTHER; note = 5prime-(E)-Vinylphosphonate
tcagaagtaaataaatgcatt

SEQ ID NO: 667 - RNA, 21 nt, synthetic construct
  source 1..21: mol_type = other RNA
  modified_base order(1,3,7,9,11,13,15,17,18,19,20): mod_base = OTHER; note = 2prime-O-methyl nucleosides
  modified_base order(2,4,5,6,8,10,12,14,16,21): mod_base = OTHER; note = 2prime-Fluoro nucleosides
  modified_base order(1..3,14..21): mod_base = OTHER; note = Phosphorothioate linkage
  modified_base 1: mod_base = OTHER; note = 5prime-(E)-Vinylphosphonate
tcaataaatttgattaacatt

SEQ ID NO: 668 - RNA, 21 nt, synthetic construct
  source 1..21: mol_type = other RNA
  modified_base order(1,3,7,9,11,13,15,17,18,19,20): mod_base = OTHER; note = 2prime-O-methyl nucleosides
  modified_base order(2,4,5,6,8,10,12,14,16,21): mod_base = OTHER; note = 2prime-Fluoro nucleosides
  modified_base order(1..3,14..21): mod_base = OTHER; note = Phosphorothioate linkage
  modified_base 1: mod_base = OTHER; note = 5prime-(E)-Vinylphosphonate
tataatttcatttagtcattt

SEQ ID NO: 669 - RNA, 21 nt, synthetic construct
  source 1..21: mol_type = other RNA
  modified_base order(1,3,7,9,11,13,15,17,18,19,20): mod_base = OTHER; note = 2prime-O-methyl nucleosides
  modified_base order(2,4,5,6,8,10,12,14,16,21): mod_base = OTHER; note = 2prime-Fluoro nucleosides
  modified_base order(1..3,14..21): mod_base = OTHER; note = Phosphorothioate linkage
  modified_base 1: mod_base = OTHER; note = 5prime-(E)-Vinylphosphonate
taataatttcatttagtcatt

SEQ ID NO: 670 - RNA, 21 nt, synthetic construct
  source 1..21: mol_type = other RNA
  modified_base order(1,3,7,9,11,13,15,17,18,19,20): mod_base = OTHER; note = 2prime-O-methyl nucleosides
  modified_base order(2,4,5,6,8,10,12,14,16,21): mod_base = OTHER; note = 2prime-Fluoro nucleosides
  modified_base order(1..3,14..21): mod_base = OTHER; note = Phosphorothioate linkage
  modified_base 1: mod_base = OTHER; note = 5prime-(E)-Vinylphosphonate
tcaaattagatgtaagaaatt

SEQ ID NO: 671 - RNA, 21 nt, synthetic construct
  source 1..21: mol_type = other RNA
  modified_base order(1,3,7,9,11,13,15,17,18,19,20): mod_base = OTHER; note = 2prime-O-methyl nucleosides
  modified_base order(2,4,5,6,8,10,12,14,16,21): mod_base = OTHER; note = 2prime-Fluoro nucleosides
  modified_base order(1..3,14..21): mod_base = OTHER; note = Phosphorothioate linkage
  modified_base 1: mod_base = OTHER; note = 5prime-(E)-Vinylphosphonate
tctacaaattagatgtaagtt

SEQ ID NO: 672 - RNA, 21 nt, synthetic construct
  source 1..21: mol_type = other RNA
  modified_base order(1,3,7,9,11,13,15,17,18,19,20): mod_base = OTHER; note = 2prime-O-methyl nucleosides
  modified_base order(2,4,5,6,8,10,12,14,16,21): mod_base = OTHER; note = 2prime-Fluoro nucleosides
  modified_base order(1..3,14..21): mod_base = OTHER; note = Phosphorothioate linkage
  modified_base 1: mod_base = OTHER; note = 5prime-(E)-Vinylphosphonate
tcttatactgtttctacaatt

SEQ ID NO: 673 - RNA, 21 nt, synthetic construct
  source 1..21: mol_type = other RNA
  modified_base order(1,3,7,9,11,13,15,17,18,19,20): mod_base = OTHER; note = 2prime-O-methyl nucleosides
  modified_base order(2,4,5,6,8,10,12,14,16,21): mod_base = OTHER; note = 2prime-Fluoro nucleosides
  modified_base order(1..3,14..21): mod_base = OTHER; note = Phosphorothioate linkage
  modified_base 1: mod_base = OTHER; note = 5prime-(E)-Vinylphosphonate
taacttatactgtttctactt

SEQ ID NO: 674 - RNA, 21 nt, synthetic construct
  source 1..21: mol_type = other RNA
  modified_base order(1,3,7,9,11,13,15,17,18,19,20): mod_base = OTHER; note = 2prime-O-methyl nucleosides
  modified_base order(2,4,5,6,8,10,12,14,16,21): mod_base = OTHER; note = 2prime-Fluoro nucleosides
  modified_base order(1..3,14..21): mod_base = OTHER; note = Phosphorothioate linkage
  modified_base 1: mod_base = OTHER; note = 5prime-(E)-Vinylphosphonate
ttataacttatactgtttctt

SEQ ID NO: 675 - DNA, 45 bp, synthetic construct
  source 1..45: mol_type = other DNA
tctggtacaaagaacagtggctcaccagattacactgttggagtg

SEQ ID NO: 676 - RNA, 20 nt, synthetic construct
  source 1..20: mol_type = other RNA
tacaaagaacagtggctcac

SEQ ID NO: 677 - RNA, 20 nt, synthetic construct
  source 1..20: mol_type = other RNA
acaaagaacagtggctcacc

SEQ ID NO: 678 - RNA, 20 nt, synthetic construct
  source 1..20: mol_type = other RNA
caaagaacagtggctcacca

SEQ ID NO: 679 - RNA, 20 nt, synthetic construct
  source 1..20: mol_type = other RNA
aaagaacagtggctcaccag

SEQ ID NO: 680 - RNA, 20 nt, synthetic construct
  source 1..20: mol_type = other RNA
aagaacagtggctcaccaga

SEQ ID NO: 681 - RNA, 20 nt, synthetic construct
  source 1..20: mol_type = other RNA
agaacagtggctcaccagat

SEQ ID NO: 682 - RNA, 20 nt, synthetic construct
  source 1..20: mol_type = other RNA
gaacagtggctcaccagatt

SEQ ID NO: 683 - RNA, 20 nt, synthetic construct
  source 1..20: mol_type = other RNA
aacagtggctcaccagatta

SEQ ID NO: 684 - RNA, 20 nt, synthetic construct
  source 1..20: mol_type = other RNA
acagtggctcaccagattac

SEQ ID NO: 685 - RNA, 20 nt, synthetic construct
  source 1..20: mol_type = other RNA
cagtggctcaccagattaca

SEQ ID NO: 686 - RNA, 20 nt, synthetic construct
  source 1..20: mol_type = other RNA
agtggctcaccagattacac

SEQ ID NO: 687 - RNA, 20 nt, synthetic construct
  source 1..20: mol_type = other RNA
gtggctcaccagattacact

SEQ ID NO: 688 - RNA, 20 nt, synthetic construct
  source 1..20: mol_type = other RNA
tggctcaccagattacactg

SEQ ID NO: 689 - RNA, 20 nt, synthetic construct
  source 1..20: mol_type = other RNA
ggctcaccagattacactgt

SEQ ID NO: 690 - RNA, 20 nt, synthetic construct
  source 1..20: mol_type = other RNA
gctcaccagattacactgtt

SEQ ID NO: 691 - RNA, 20 nt, synthetic construct
  source 1..20: mol_type = other RNA
ctcaccagattacactgttg

SEQ ID NO: 692 - RNA, 20 nt, synthetic construct
  source 1..20: mol_type = other RNA
aagaacagtggctcaccaaa

SEQ ID NO: 693 - RNA, 20 nt, synthetic construct
  source 1..20: mol_type = other RNA
aagaacagtggctcacctga

SEQ ID NO: 694 - RNA, 20 nt, synthetic construct
  source 1..20: mol_type = other RNA
aagaacagtggctcacaaga

SEQ ID NO: 695 - RNA, 20 nt, synthetic construct
  source 1..20: mol_type = other RNA
aagaacagtggctcaacaga

SEQ ID NO: 696 - RNA, 20 nt, synthetic construct
  source 1..20: mol_type = other RNA
aagaacagtggctaaccaga

SEQ ID NO: 697 - RNA, 20 nt, synthetic construct
  source 1..20: mol_type = other RNA
aagaacagtggcacaccaga

SEQ ID NO: 698 - RNA, 20 nt, synthetic construct
  source 1..20: mol_type = other RNA
aagaacagtggatcaccaga

SEQ ID NO: 699 - RNA, 20 nt, synthetic construct
  source 1..20: mol_type = other RNA
aagaacagtgtctcaccaga

SEQ ID NO: 700 - RNA, 20 nt, synthetic construct
  source 1..20: mol_type = other RNA
aagaacagttgctcaccaga

SEQ ID NO: 701 - RNA, 20 nt, synthetic construct
  source 1..20: mol_type = other RNA
aagaacagaggctcaccaga

SEQ ID NO: 702 - RNA, 20 nt, synthetic construct
  source 1..20: mol_type = other RNA
aagaacattggctcaccaga

SEQ ID NO: 703 - RNA, 20 nt, synthetic construct
  source 1..20: mol_type = other RNA
aagaactgtggctcaccaga

SEQ ID NO: 704 - RNA, 20 nt, synthetic construct
  source 1..20: mol_type = other RNA
aagaaaagtggctcaccaga

SEQ ID NO: 705 - RNA, 20 nt, synthetic construct
  source 1..20: mol_type = other RNA
aagtacagtggctcaccaga

SEQ ID NO: 706 - RNA, 20 nt, synthetic construct
  source 1..20: mol_type = other RNA
aagatcagtggctcaccaga

SEQ ID NO: 707 - RNA, 20 nt, synthetic construct
  source 1..20: mol_type = other RNA
gaacagtggctcaccagttt

SEQ ID NO: 708 - RNA, 20 nt, synthetic construct
  source 1..20: mol_type = other RNA
gaacagtggctcaccagaat

SEQ ID NO: 709 - RNA, 20 nt, synthetic construct
  source 1..20: mol_type = other RNA
gaaaagtggctcaccagatt

SEQ ID NO: 710 - RNA, 20 nt, synthetic construct
  source 1..20: mol_type = other RNA
gaactgtggctcaccagatt

SEQ ID NO: 711 - RNA, 20 nt, synthetic construct
  source 1..20: mol_type = other RNA
gaacattggctcaccagatt

SEQ ID NO: 712 - RNA, 20 nt, synthetic construct
  source 1..20: mol_type = other RNA
gaacagaggctcaccagatt

SEQ ID NO: 713 - RNA, 20 nt, synthetic construct
  source 1..20: mol_type = other RNA
gaacagttgctcaccagatt

SEQ ID NO: 714 - RNA, 20 nt, synthetic construct
  source 1..20: mol_type = other RNA
gaacagtgtctcaccagatt

SEQ ID NO: 715 - RNA, 20 nt, synthetic construct
  source 1..20: mol_type = other RNA
gaacagtggatcaccagatt

SEQ ID NO: 716 - RNA, 20 nt, synthetic construct
  source 1..20: mol_type = other RNA
gaacagtggcacaccagatt

SEQ ID NO: 717 - RNA, 20 nt, synthetic construct
  source 1..20: mol_type = other RNA
gaacagtggctaaccagatt

SEQ ID NO: 718 - RNA, 20 nt, synthetic construct
  source 1..20: mol_type = other RNA
gaacagtggctcaacagatt

SEQ ID NO: 719 - RNA, 20 nt, synthetic construct
  source 1..20: mol_type = other RNA
gaacagtggctcacaagatt

SEQ ID NO: 720 - RNA, 20 nt, synthetic construct
  source 1..20: mol_type = other RNA
gaacagtggctcacctgatt

SEQ ID NO: 721 - RNA, 20 nt, synthetic construct
  source 1..20: mol_type = other RNA
gaacagtggctcaccatatt

SEQ ID NO: 722 - RNA, 16 nt, synthetic construct
  source 1..16: mol_type = other RNA
aagaacagtggctcaa

SEQ ID NO: 723 - RNA, 16 nt, synthetic construct
  source 1..16: mol_type = other RNA
agaacagtggctcaca

SEQ ID NO: 724 - RNA, 16 nt, synthetic construct
  source 1..16: mol_type = other RNA
gaacagtggctcacca

SEQ ID NO: 725 - RNA, 16 nt, synthetic construct
  source 1..16: mol_type = other RNA
aacagtggctcaccaa

SEQ ID NO: 726 - RNA, 16 nt, synthetic construct
  source 1..16: mol_type = other RNA
acagtggctcaccaga

SEQ ID NO: 727 - RNA, 16 nt, synthetic construct
  source 1..16: mol_type = other RNA
cagtggctcaccagaa

SEQ ID NO: 728 - RNA, 16 nt, synthetic construct
  source 1..16: mol_type = other RNA
agtggctcaccagata

SEQ ID NO: 729 - RNA, 16 nt, synthetic construct
  source 1..16: mol_type = other RNA
gtggctcaccagatta

SEQ ID NO: 730 - RNA, 16 nt, synthetic construct
  source 1..16: mol_type = other RNA
tggctcaccagattaa

SEQ ID NO: 731 - RNA, 16 nt, synthetic construct
  source 1..16: mol_type = other RNA
ggctcaccagattaca

SEQ ID NO: 732 - RNA, 16 nt, synthetic construct
  source 1..16: mol_type = other RNA
gctcaccagattacaa

SEQ ID NO: 733 - RNA, 16 nt, synthetic construct
  source 1..16: mol_type = other RNA
ctcaccagattacaca

SEQ ID NO: 734 - RNA, 16 nt, synthetic construct
  source 1..16: mol_type = other RNA
tcaccagattacacta

SEQ ID NO: 735 - RNA, 16 nt, synthetic construct
  source 1..16: mol_type = other RNA
caccagattacactga

SEQ ID NO: 736 - RNA, 16 nt, synthetic construct
  source 1..16: mol_type = other RNA
accagattacactgta

SEQ ID NO: 737 - RNA, 16 nt, synthetic construct
  source 1..16: mol_type = other RNA
ccagattacactgtta

SEQ ID NO: 738 - RNA, 16 nt, synthetic construct
  source 1..16: mol_type = other RNA
acagtggctcaccaga

SEQ ID NO: 739 - RNA, 16 nt, synthetic construct
  source 1..16: mol_type = other RNA
acagtggctcaccaga

SEQ ID NO: 740 - RNA, 16 nt, synthetic construct
  source 1..16: mol_type = other RNA
acagtggctcaccaga

SEQ ID NO: 741 - RNA, 16 nt, synthetic construct
  source 1..16: mol_type = other RNA
acagtggctcaccaga

SEQ ID NO: 742 - RNA, 16 nt, synthetic construct
  source 1..16: mol_type = other RNA
acagtggctcaccaga

SEQ ID NO: 743 - RNA, 16 nt, synthetic construct
  source 1..16: mol_type = other RNA
acagtggctcaccaga

SEQ ID NO: 744 - RNA, 16 nt, synthetic construct
  source 1..16: mol_type = other RNA
acagtggctcaccaga

SEQ ID NO: 745 - RNA, 16 nt, synthetic construct
  source 1..16: mol_type = other RNA
acagtggctcaccaga

SEQ ID NO: 746 - RNA, 16 nt, synthetic construct
  source 1..16: mol_type = other RNA
acagtggctcaccaga

SEQ ID NO: 747 - RNA, 16 nt, synthetic construct
  source 1..16: mol_type = other RNA
acagtggctcaccaga

SEQ ID NO: 748 - RNA, 16 nt, synthetic construct
  source 1..16: mol_type = other RNA
acagtggctcaccaga

SEQ ID NO: 749 - RNA, 16 nt, synthetic construct
  source 1..16: mol_type = other RNA
acagtggctcaccaga

SEQ ID NO: 750 - RNA, 16 nt, synthetic construct
  source 1..16: mol_type = other RNA
acagtggctcaccaga

SEQ ID NO: 751 - RNA, 16 nt, synthetic construct
  source 1..16: mol_type = other RNA
acagtggctcaccaga

SEQ ID NO: 752 - RNA, 16 nt, synthetic construct
  source 1..16: mol_type = other RNA
acagtggctcaccaga

SEQ ID NO: 753 - RNA, 16 nt, synthetic construct
  source 1..16: mol_type = other RNA
agtggctcaccagata

SEQ ID NO: 754 - RNA, 16 nt, synthetic construct
  source 1..16: mol_type = other RNA
agtggctcaccagata

SEQ ID NO: 755 - RNA, 16 nt, synthetic construct
  source 1..16: mol_type = other RNA
agtggctcaccagata

SEQ ID NO: 756 - RNA, 16 nt, synthetic construct
  source 1..16: mol_type = other RNA
agtggctcaccagata

SEQ ID NO: 757 - RNA, 16 nt, synthetic construct
  source 1..16: mol_type = other RNA
agtggctcaccagata

SEQ ID NO: 758 - RNA, 16 nt, synthetic construct
  source 1..16: mol_type = other RNA
agtggctcaccagata

SEQ ID NO: 759 - RNA, 16 nt, synthetic construct
  source 1..16: mol_type = other RNA
agtggctcaccagata

SEQ ID NO: 760 - RNA, 16 nt, synthetic construct
  source 1..16: mol_type = other RNA
agtggctcaccagata

SEQ ID NO: 761 - RNA, 16 nt, synthetic construct
  source 1..16: mol_type = other RNA
agtggctcaccagata

SEQ ID NO: 762 - RNA, 16 nt, synthetic construct
  source 1..16: mol_type = other RNA
agtggctcaccagata

SEQ ID NO: 763 - RNA, 16 nt, synthetic construct
  source 1..16: mol_type = other RNA
agtggctcaccagata

SEQ ID NO: 764 - RNA, 16 nt, synthetic construct
  source 1..16: mol_type = other RNA
agtggctcaccagata

SEQ ID NO: 765 - RNA, 16 nt, synthetic construct
  source 1..16: mol_type = other RNA
agtggctcaccagata

SEQ ID NO: 766 - skipped

SEQ ID NO: 767 - RNA, 16 nt, synthetic construct
  source 1..16: mol_type = other RNA
agtggctcaccagata

SEQ ID NO: 768 - RNA, 21 nt, synthetic construct
  source 1..21: mol_type = other RNA
ttgagccactgttctttgtaa

SEQ ID NO: 769 - RNA, 21 nt, synthetic construct
  source 1..21: mol_type = other RNA
tgtgagccactgttctttgta

SEQ ID NO: 770 - RNA, 21 nt, synthetic construct
  source 1..21: mol_type = other RNA
tggtgagccactgttctttga

SEQ ID NO: 771 - RNA, 21 nt, synthetic construct
  source 1..21: mol_type = other RNA
ttggtgagccactgttcttta

SEQ ID NO: 772 - RNA, 21 nt, synthetic construct
  source 1..21: mol_type = other RNA
tctggtgagccactgttctta

SEQ ID NO: 773 - RNA, 21 nt, synthetic construct
  source 1..21: mol_type = other RNA
ttctggtgagccactgttcta

SEQ ID NO: 774 - RNA, 21 nt, synthetic construct
  source 1..21: mol_type = other RNA
tatctggtgagccactgttca

SEQ ID NO: 775 - RNA, 21 nt, synthetic construct
  source 1..21: mol_type = other RNA
taatctggtgagccactgtta

SEQ ID NO: 776 - RNA, 21 nt, synthetic construct
  source 1..21: mol_type = other RNA
ttaatctggtgagccactgta

SEQ ID NO: 777 - RNA, 21 nt, synthetic construct
  source 1..21: mol_type = other RNA
tgtaatctggtgagccactga

SEQ ID NO: 778 - RNA, 21 nt, synthetic construct
  source 1..21: mol_type = other RNA
ttgtaatctggtgagccacta

SEQ ID NO: 779 - RNA, 21 nt, synthetic construct
  source 1..21: mol_type = other RNA
tgtgtaatctggtgagccaca

SEQ ID NO: 780 - RNA, 21 nt, synthetic construct
  source 1..21: mol_type = other RNA
tagtgtaatctggtgagccaa

SEQ ID NO: 781 - RNA, 21 nt, synthetic construct
  source 1..21: mol_type = other RNA
tcagtgtaatctggtgagcca

SEQ ID NO: 782 - RNA, 21 nt, synthetic construct
  source 1..21: mol_type = other RNA
tacagtgtaatctggtgagca

SEQ ID NO: 783 - RNA, 21 nt, synthetic construct
  source 1..21: mol_type = other RNA
taacagtgtaatctggtgaga

SEQ ID NO: 784 - RNA, 21 nt, synthetic construct
  source 1..21: mol_type = other RNA
tttggtgagccactgttctta

SEQ ID NO: 785 - RNA, 21 nt, synthetic construct
  source 1..21: mol_type = other RNA
tcaggtgagccactgttctta

SEQ ID NO: 786 - RNA, 21 nt, synthetic construct
  source 1..21: mol_type = other RNA
tcttgtgagccactgttctta

SEQ ID NO: 787 - RNA, 21 nt, synthetic construct
  source 1..21: mol_type = other RNA
tctgttgagccactgttctta

SEQ ID NO: 788 - RNA, 21 nt, synthetic construct
  source 1..21: mol_type = other RNA
tctggttagccactgttctta

SEQ ID NO: 789 - RNA, 21 nt, synthetic construct
  source 1..21: mol_type = other RNA
tctggtgtgccactgttctta

SEQ ID NO: 790 - RNA, 21 nt, synthetic construct
  source 1..21: mol_type = other RNA
tctggtgatccactgttctta

SEQ ID NO: 791 - RNA, 21 nt, synthetic construct
  source 1..21: mol_type = other RNA
tctggtgagacactgttctta

SEQ ID NO: 792 - RNA, 21 nt, synthetic construct
  source 1..21: mol_type = other RNA
tctggtgagcaactgttctta

SEQ ID NO: 793 - RNA, 21 nt, synthetic construct
  source 1..21: mol_type = other RNA
tctggtgagcctctgttctta

SEQ ID NO: 794 - RNA, 21 nt, synthetic construct
  source 1..21: mol_type = other RNA
tctggtgagccaatgttctta

SEQ ID NO: 795 - RNA, 21 nt, synthetic construct
  source 1..21: mol_type = other RNA
tctggtgagccacagttctta

SEQ ID NO: 796 - RNA, 21 nt, synthetic construct
  source 1..21: mol_type = other RNA
tctggtgagccacttttctta

SEQ ID NO: 797 - RNA, 21 nt, synthetic construct
  source 1..21: mol_type = other RNA
tctggtgagccactgatctta

SEQ ID NO: 798 - RNA, 21 nt, synthetic construct
  source 1..21: mol_type = other RNA
tctggtgagccactgtactta

SEQ ID NO: 799 - RNA, 21 nt, synthetic construct
  source 1..21: mol_type = other RNA
tttctggtgagccactgttca

SEQ ID NO: 800 - RNA, 21 nt, synthetic construct
  source 1..21: mol_type = other RNA
taactggtgagccactgttca

SEQ ID NO: 801 - RNA, 21 nt, synthetic construct
  source 1..21: mol_type = other RNA
tatatggtgagccactgttca

SEQ ID NO: 802 - RNA, 21 nt, synthetic construct
  source 1..21: mol_type = other RNA
tatcaggtgagccactgttca

SEQ ID NO: 803 - RNA, 21 nt, synthetic construct
  source 1..21: mol_type = other RNA
tatcttgtgagccactgttca

SEQ ID NO: 804 - RNA, 21 nt, synthetic construct
  source 1..21: mol_type = other RNA
tatctgttgagccactgttca

SEQ ID NO: 805 - RNA, 21 nt, synthetic construct
  source 1..21: mol_type = other RNA
tatctggttagccactgttca

SEQ ID NO: 806 - RNA, 21 nt, synthetic construct
  source 1..21: mol_type = other RNA
tatctggtgtgccactgttca

SEQ ID NO: 807 - RNA, 21 nt, synthetic construct
  source 1..21: mol_type = other RNA
tatctggtgatccactgttca

SEQ ID NO: 808 - RNA, 21 nt, synthetic construct
  source 1..21: mol_type = other RNA
tatctggtgagacactgttca

SEQ ID NO: 809 - RNA, 21 nt, synthetic construct
  source 1..21: mol_type = other RNA
tatctggtgagcaactgttca

SEQ ID NO: 810 - RNA, 21 nt, synthetic construct
  source 1..21: mol_type = other RNA
tatctggtgagcctctgttca

SEQ ID NO: 811 - RNA, 21 nt, synthetic construct
  source 1..21: mol_type = other RNA
tatctggtgagccaatgttca

SEQ ID NO: 812 - RNA, 21 nt, synthetic construct
  source 1..21: mol_type = other RNA
tatctggtgagccacagttca

SEQ ID NO: 813 - RNA, 21 nt, synthetic construct
  source 1..21: mol_type = other RNA
tatctggtgagccacttttca

SEQ ID NO: 814 - DNA, 1281 bp, Homo sapiens
  source 1..1281: mol_type = genomic DNA
atgcccttgctttggctgagaggatttctgttggcaagttgctggattatagtgaggagttcccccaccccaggatccgaggggcacagcgcggcccccgactgtccgtcctgtgcgctggccgccctcccaaaggatgtacccaactctcagccagagatggtggaggccgtcaagaagcacattttaaacatgctgcacttgaagaagagacccgatgtcacccagccggtacccaaggcggcgcttctgaacgcgatcagaaagcttcatgtgggcaaagtcggggagaacgggtatgtggagatagaggatgacattggaaggagggcagaaatgaatgaacttatggagcagacctcggagatcatcacgtttgccgagtcaggaacagccaggaagacgctgcacttcgagatttccaaggaaggcagtgacctgtcagtggtggagcgtgcagaagtctggctcttcctaaaagtccccaaggccaacaggaccaggaccaaagtcaccatccgcctcttccagcagcagaagcacccgcagggcagcttggacacaggggaagaggccgaggaagtgggcttaaagggggagaggagtgaactgttgctctctgaaaaagtagtagacgctcggaagagcacctggcatgtcttccctgtctccagcagcatccagcggttgctggaccagggcaagagctccctggacgttcggattgcctgtgagcagtgccaggagagtggcgccagcttggttctcctgggcaagaagaagaagaaagaagaggagggggaagggaaaaagaagggcggaggtgaaggtggggcaggagcagatgaggaaaaggagcagtcgcacagacctttcctcatgctgcaggcccggcagtctgaagaccaccctcatcgccggcgtcggcggggcttggagtgtgatggcaaggtcaacatctgctgtaagaaacagttctttgtcagtttcaaggacatcggctggaatgactggatcattgctccctctggctatcatgccaactactgcgagggtgagtgcccgagccatatagcaggcacgtccgggtcctcactgtccttccactcaacagtcatcaaccactaccgcatgcggggccatagcccctttgccaacctcaaatcgtgctgtgtgcccaccaagctgagacccatgtccatgttgtactatgatgatggtcaaaacatcatcaaaaaggacattcagaacatgatcgtggaggagtgtgggtgctcatag

SEQ ID NO: 815 - DNA, 1275 bp, Mus musculus
  source 1..1275: mol_type = genomic DNA
atgcccttgctttggctgagaggatttctgttggcaagttgctggattatagtgaggagttcccccaccccaggatccgaggggcacggctcagccccggactgcccgtcctgtgcgctggccacccttccgaaggatggacctaactctcagccagagatggtagaggctgtcaagaagcacatcttaaacatgctgcacttgaagaagagacccgatgtcacccagccggtgcccaaggcggcgcttctcaacgcgatcagaaagcttcatgtgggtaaagtgggggagaacgggtatgtggagatagaggacgacattggcaggagggccgaaatgaatgaactcatggagcagacctcggagatcatcacctttgccgagtcaggcacagccaggaagacactgcactttgagatttccaaggaaggcagtgacctgtcagtagtggagcgtgcagaagtgtggctcttcctgaaagtccccaaggctaacagaaccaggaccaaagtcaccatccgtctatttcagcagcagaagcacccacagggcagcttggacacgggggatgaggccgaggaaatgggcttaaagggggagaggagtgaactgttgctatcagagaaagtagttgatgctcggaagagtacctggcacatctttccagtgtccagcagcatccagcgcctgctggaccagggaaagagttccctggacgtgcggattgcttgtgagcagtgccaggagagtggtgccagtctagtgcttctgggcaagaagaagaagaaagaggtggatggagatgggaagaagaaagatgggagtgacggagggctggaagaggaaaaggaacagtcacatagacctttcctcatgctgcaggctaggcagtccgaagaccaccctcatcgcaggcgtaggcggggcttggagtgcgacggcaaggtcaacatttgctgtaagaaacagttctttgtcagcttcaaggacattggctggaatgactggatcattgctccctctggctatcacgccaattattgtgagggggagtgcccaagccacatagcaggcacctctgggtcctcgctctccttccactcaacagtcattaaccactaccgcatgaggggtcacagcccctttgccaaccttaagtcatgctgtgtgcccaccaagctgagacccatgtccatgctgtattacgatgatggtcaaaacatcatcaaaaaggacattcaaaacatgattgtggaggagtgtggctgctcctag

SEQ ID NO: 816 - skipped

SEQ ID NO: 817 - DNA, 45 bp, synthetic construct
  source 1..45: mol_type = other DNA
ttatatgagtgcatttcaactatgtcaatggtttcttaatattta

SEQ ID NO: 818 - DNA, 45 bp, synthetic construct
  source 1..45: mol_type = other DNA
ttaaggcaagagtagatggccatgttcaactttacaaaatttctt

SEQ ID NO: 819 - DNA, 45 bp, synthetic construct
  source 1..45: mol_type = other DNA
ttgtattaagcacggacccatattatcatattcacttaaaaaaat

SEQ ID NO: 820 - DNA, 45 bp, synthetic construct
  source 1..45: mol_type = other DNA
tggaaaaaagtttctaataattgggaacaattacattaattaata

SEQ ID NO: 821 - DNA, 45 bp, synthetic construct
  source 1..45: mol_type = other DNA
aaaatattgaagcttttagccctatgtcaatttgtagattaaaat

SEQ ID NO: 822 - DNA, 45 bp, synthetic construct
  source 1..45: mol_type = other DNA
atatgtttgtccatctgttggatccaaacatttctatattttgta

SEQ ID NO: 823 - DNA, 45 bp, synthetic construct
  source 1..45: mol_type = other DNA
atttacaatatgtttaaagagataacagtttgatatgttttcatg

SEQ ID NO: 824 - DNA, 45 bp, synthetic construct
  source 1..45: mol_type = other DNA
agttgtattaagcacggacccatattatcatattcacttaaaaaa

SEQ ID NO: 825 - DNA, 45 bp, synthetic construct
  source 1..45: mol_type = other DNA
tttaaattataacatatgggattcttagtagtatgtttttttctt

SEQ ID NO: 826 - DNA, 45 bp, synthetic construct
  source 1..45: mol_type = other DNA
aaatattgaagcttttagccctatgtcaatttgtagattaaaata

SEQ ID NO: 827 - DNA, 45 bp, synthetic construct
  source 1..45: mol_type = other DNA
tggatattgagtgattgggttatcaaacacccacaaactttaatt

SEQ ID NO: 828 - DNA, 45 bp, synthetic construct
  source 1..45: mol_type = other DNA
aagtttctaataattgggaacaattacattaattaatattttgta

SEQ ID NO: 829 - DNA, 45 bp, synthetic construct
  source 1..45: mol_type = other DNA
aaatggaaaaaagtttctaataattgggaacaattacattaatta

SEQ ID NO: 830 - DNA, 45 bp, synthetic construct
  source 1..45: mol_type = other DNA
ccctgcagtctccttaaaggtagaacaaatactttctattttttt

SEQ ID NO: 831 - DNA, 45 bp, synthetic construct
  source 1..45: mol_type = other DNA
tgttttcatgtgtttatagcagaagttatttatttctatggcatt

SEQ ID NO: 832 - DNA, 45 bp, synthetic construct
  source 1..45: mol_type = other DNA
atgtccatacacattttaagcacttcaggctgtcattttttaatg

SEQ ID NO: 833 - DNA, 45 bp, synthetic construct
  source 1..45: mol_type = other DNA
gtaaaggctttaaattataacatatgggattcttagtagtatgtt

SEQ ID NO: 834 - DNA, 45 bp, synthetic construct
  source 1..45: mol_type = other DNA
ttatgatcttagaactatgcaacctaataggtttgaaactgttta

SEQ ID NO: 835 - DNA, 45 bp, synthetic construct
  source 1..45: mol_type = other DNA
tcaagagcagaagcaaaccacatgtctcagctatattattattta

SEQ ID NO: 836 - DNA, 45 bp, synthetic construct
  source 1..45: mol_type = other DNA
aaaattgagaacaagtatggaaagaatgaaagatcaaggaaaaaa

SEQ ID NO: 837 - DNA, 45 bp, synthetic construct
  source 1..45: mol_type = other DNA
ggatgacattggaaggagggcagaaatgaatgaacttatggagca

SEQ ID NO: 838 - DNA, 45 bp, synthetic construct
  source 1..45: mol_type = other DNA
gtgcccaccaagctgagacccatgtccatgttgtactatgatgat

SEQ ID NO: 839 - DNA, 45 bp, synthetic construct
  source 1..45: mol_type = other DNA
tgtctttaaatatcttttaatagtaacatgtattttatggaccaa

SEQ ID NO: 840 - DNA, 45 bp, synthetic construct
  source 1..45: mol_type = other DNA
ttttgttaaatttatatggctttgaaatagaagtataagttgcta

SEQ ID NO: 841 - DNA, 45 bp, synthetic construct
  source 1..45: mol_type = other DNA
tttatttacaatatgtttaaagagataacagtttgatatgttttc

SEQ ID NO: 842 - DNA, 45 bp, synthetic construct
  source 1..45: mol_type = other DNA
ttgaaaaacagtgcattgacaatgggttgatatttttctttaaaa

SEQ ID NO: 843 - DNA, 45 bp, synthetic construct
  source 1..45: mol_type = other DNA
tttcatactggatgtacagtagttgtacactgttggatatcaagt

SEQ ID NO: 844 - DNA, 45 bp, synthetic construct
  source 1..45: mol_type = other DNA
ttgatatgttttcatgtgtttatagcagaagttatttatttctat

SEQ ID NO: 845 - DNA, 45 bp, synthetic construct
  source 1..45: mol_type = other DNA
tggtgagaaaagttttaaggcaagagtagatggccatgttcaact

SEQ ID NO: 846 - DNA, 45 bp, synthetic construct
  source 1..45: mol_type = other DNA
gtatatatacattgcttgtgcatatgcatatctgtatgtatatat

SEQ ID NO: 847 - DNA, 45 bp, synthetic construct
  source 1..45: mol_type = other DNA
ataattatgaaagccaagataatctgaagcctgttttattttaaa

SEQ ID NO: 848 - DNA, 45 bp, synthetic construct
  source 1..45: mol_type = other DNA
caaaatgaagaaatttttaaggtttctgagttaaccagaaaaata

SEQ ID NO: 849 - DNA, 45 bp, synthetic construct
  source 1..45: mol_type = other DNA
tatgtttgtccatctgttggatccaaacatttctatattttgtaa

SEQ ID NO: 850 - DNA, 45 bp, synthetic construct
  source 1..45: mol_type = other DNA
gtgaccacagttatcagaagcagagaaatgtaattccatatttta

SEQ ID NO: 851 - DNA, 45 bp, synthetic construct
  source 1..45: mol_type = other DNA
aaaaagagagacttttttgtattggaagtaatctgattaattttt

SEQ ID NO: 852 - DNA, 45 bp, synthetic construct
  source 1..45: mol_type = other DNA
atatatacattgcttgtgcatatgcatatctgtatgtatatatac

SEQ ID NO: 853 - DNA, 45 bp, synthetic construct
  source 1..45: mol_type = other DNA
aaaagagagacttttttgtattggaagtaatctgattaattttta

SEQ ID NO: 854 - DNA, 45 bp, synthetic construct
  source 1..45: mol_type = other DNA
gtaggcaatgtcactactgggcaaatacacttactgtgttctaga

SEQ ID NO: 855 - DNA, 45 bp, synthetic construct
  source 1..45: mol_type = other DNA
cttaaaaatctgcccacaccaatcttagaagctctgaaaagaatt

SEQ ID NO: 856 - DNA, 45 bp, synthetic construct
  source 1..45: mol_type = other DNA
tttatatgagtgcatttcaactatgtcaatggtttcttaatattt

SEQ ID NO: 857 - DNA, 45 bp, synthetic construct
  source 1..45: mol_type = other DNA
atttcaactatgtcaatggtttcttaatatttattgtgtagaagt

SEQ ID NO: 858 - DNA, 45 bp, synthetic construct
  source 1..45: mol_type = other DNA
tcttatcccagaagaccaaccaatttcatatttatttaagattga

SEQ ID NO: 859 - DNA, 45 bp, synthetic construct
  source 1..45: mol_type = other DNA
actacatgcagttctttaaccaatgtctgtttggctaatgtaatt

SEQ ID NO: 860 - DNA, 45 bp, synthetic construct
  source 1..45: mol_type = other DNA
gtgtctattggaatcaatcttaaatcagaagctttttcagaaaaa

SEQ ID NO: 861 - DNA, 45 bp, synthetic construct
  source 1..45: mol_type = other DNA
gtttaaattaaaccctgtatcactgagaagctgttgtatgggtca

SEQ ID NO: 862 - DNA, 45 bp, synthetic construct
  source 1..45: mol_type = other DNA
caaaacacagtatttttaagaaggataggctatagtttttgcttt

SEQ ID NO: 863 - DNA, 45 bp, synthetic construct
  source 1..45: mol_type = other DNA
gatcaaggaaaaaagaataccaagttacatttcgttaaggtgctt

SEQ ID NO: 864 - DNA, 45 bp, synthetic construct
  source 1..45: mol_type = other DNA
atgttttcatgtgtttatagcagaagttatttatttctatggcat

SEQ ID NO: 865 - DNA, 45 bp, synthetic construct; identical to SEQ ID NO: 817
  source 1..45: mol_type = other DNA

SEQ ID NO: 866 - DNA, 45 bp, synthetic construct
  source 1..45: mol_type = other DNA
ttaaattgctaatattttaacaatattagatattgttaacaattt

SEQ ID NO: 867 - DNA, 45 bp, synthetic construct
  source 1..45: mol_type = other DNA
tatgtttgtccatctgttggattcaaacatttctatattttgtaa

SEQ ID NO: 868 - DNA, 45 bp, synthetic construct
  source 1..45: mol_type = other DNA
atatgtttgtccatctgttggattcaaacatttctatattttgta

SEQ ID NO: 869 - DNA, 45 bp, synthetic construct
  source 1..45: mol_type = other DNA
gcttgtctaaaacagctaatcagttattcatttacatatttaaaa

SEQ ID NO: 870 - DNA, 45 bp, synthetic construct
  source 1..45: mol_type = other DNA
aaatttgtatggccttgcaatagaatttaaattgctaatatttta

SEQ ID NO: 871 - DNA, 45 bp, synthetic construct
  source 1..45: mol_type = other DNA
aatagctatttttattattataattataattattattattatttt

SEQ ID NO: 872 - DNA, 45 bp, synthetic construct
  source 1..45: mol_type = other DNA
ttttgatcctagaactatgcaacctaataggtttgaaactgttta

SEQ ID NO: 873 - DNA, 45 bp, synthetic construct
  source 1..45: mol_type = other DNA
atgtccatacacattttaagcacttcaggctgtcattttaaaaat

SEQ ID NO: 874 - DNA, 45 bp, synthetic construct
  source 1..45: mol_type = other DNA
ttgtgaaaaacctttagcgccctctgaactgtttctttagtattg

SEQ ID NO: 875 - DNA, 45 bp, synthetic construct
  source 1..45: mol_type = other DNA
taaattgctaatattttaacaatattagatattgttaacaattta

SEQ ID NO: 876 - DNA, 45 bp, synthetic construct
  source 1..45: mol_type = other DNA
ttatttacgatatgtttaaagagataacggttggatatgttttca

SEQ ID NO: 877 - DNA, 45 bp, synthetic construct
  source 1..45: mol_type = other DNA
taaaatattgaagcttttagcattaagtcagtccatagattaaag

SEQ ID NO: 878 - DNA, 45 bp, synthetic construct
  source 1..45: mol_type = other DNA
gtctaaaacagctaatcagttattcatttacatatttaaaatata

SEQ ID NO: 879 - DNA, 45 bp, synthetic construct
  source 1..45: mol_type = other DNA
tttagcattaagtcagtccatagattaaagtcattgtaggaaaat

SEQ ID NO: 880 - DNA, 45 bp, synthetic construct
  source 1..45: mol_type = other DNA
ttatttatttttatgcataaagtgaatcatttcttctgtattaat

SEQ ID NO: 881 - DNA, 45 bp, synthetic construct
  source 1..45: mol_type = other DNA
tcatcaaatttgtatggccttgcaatagaatttaaattgctaata

SEQ ID NO: 882 - DNA, 45 bp, synthetic construct
  source 1..45: mol_type = other DNA
agcactcaggagccagggagttgtacaaatctctaatattctatt

SEQ ID NO: 883 - DNA, 45 bp, synthetic construct
  source 1..45: mol_type = other DNA
tttgaaaaacagtgcattgacaatggttgatatttttctttaaaa

SEQ ID NO: 884 - DNA, 45 bp, synthetic construct
  source 1..45: mol_type = other DNA
atgttttcatgtgtttatagcagaagttatttatttctattccat

SEQ ID NO: 885 - DNA, 45 bp, synthetic construct
  source 1..45: mol_type = other DNA
atatgtattaaatataccgtcaatataccttatcacattaggctg

SEQ ID NO: 886 - DNA, 45 bp, synthetic construct
  source 1..45: mol_type = other DNA
tagagccttatttttacggacttgtttgaagtttgaaaaacttta

SEQ ID NO: 887 - DNA, 45 bp, synthetic construct
  source 1..45: mol_type = other DNA
ctttaaccaatgtctggctaatgtaattaaagttgttaatttata

SEQ ID NO: 888 - DNA, 45 bp, synthetic construct
  source 1..45: mol_type = other DNA
agcaaatcacgtgtctcagctatattattatttatttttatgcat

SEQ ID NO: 889 - DNA, 45 bp, synthetic construct
  source 1..45: mol_type = other DNA
aggaaatgcatgtactgcataagaaatgaattataattaaggtct

SEQ ID NO: 890 - DNA, 45 bp, synthetic construct
  source 1..45: mol_type = other DNA
atttcatactggatgtacagtagtgtacactgttggattatcaag

SEQ ID NO: 891 - DNA, 45 bp, synthetic construct
  source 1..45: mol_type = other DNA
agctatttttattattataattataattattattattattttgta

SEQ ID NO: 892 - DNA, 45 bp, synthetic construct
  source 1..45: mol_type = other DNA
tcaggagccagggagttgtacaaatctctaatattctattttgca

SEQ ID NO: 893 - DNA, 45 bp, synthetic construct; identical to SEQ ID NO: 852
  source 1..45: mol_type = other DNA

SEQ ID NO: 894 - DNA, 45 bp, synthetic construct
  source 1..45: mol_type = other DNA
aaatgggctgattttttcaacttatatttattatttattggaatc

SEQ ID NO: 895 - DNA, 45 bp, synthetic construct
  source 1..45: mol_type = other DNA
gttagtaggcagtattcagcaatgcccgatagcttctttggcctt

SEQ ID NO: 896 - DNA, 45 bp, synthetic construct; identical to SEQ ID NO: 856
  source 1..45: mol_type = other DNA

SEQ ID NO: 897 - DNA, 45 bp, synthetic construct
  source 1..45: mol_type = other DNA
atttcaactatgtcaatggtttcttaatatttattttgtagaagt

SEQ ID NO: 898 - DNA, 45 bp, synthetic construct
  source 1..45: mol_type = other DNA
gagatgatctagaccatgggaagagcaggatttatgtaactacta

SEQ ID NO: 899 - DNA, 45 bp, synthetic construct
  source 1..45: mol_type = other DNA
aggggtcacagcccctttgccaaccttaagtcatgctgtgtgccc

SEQ ID NO: 900 - DNA, 45 bp, synthetic construct
  source 1..45: mol_type = other DNA
aatgctttgaaaaacagtgcattgacaatggttgatatttttctt

SEQ ID NO: 901 - DNA, 45 bp, synthetic construct
  source 1..45: mol_type = other DNA
tttaaccaatgtctggctaatgtaattaaagttgttaatttatat

SEQ ID NO: 902 - DNA, 45 bp, synthetic construct
  source 1..45: mol_type = other DNA
gcaaaacacagtatttttaagaaggataagtgatagatttttttt

SEQ ID NO: 903 - DNA, 45 bp, synthetic construct
  source 1..45: mol_type = other DNA
ccaggttataagtatgtctatgtgacactatctctgtgtatttca

SEQ ID NO: 904 - DNA, 45 bp, synthetic construct
  source 1..45: mol_type = other DNA
gaccaagggaagaagaataccaagttacatttcgttaaggtgctt

SEQ ID NO: 905 - DNA, 45 bp, synthetic construct
  source 1..45: mol_type = other DNA
cttcaaggagagatacttgaaaggaatatgtttgtccatctgttg

SEQ ID NO: 906 - DNA, 45 bp, synthetic construct
  source 1..45: mol_type = other DNA
tggatatgttttcatgtgtttatagcagaagttatttatttctat

SEQ ID NO: 907 - DNA, 45 bp, synthetic construct
  source 1..45: mol_type = other DNA
actcatcaaatttgtatggccttgcaatagaatttaaattgctaa

SEQ ID NO: 908 - DNA, 45 bp, synthetic construct
  source 1..45: mol_type = other DNA
tgcactacgatggtgtttgacctgtctaatccttatttaacaagt

SEQ ID NO: 909 - DNA, 45 bp, synthetic construct
  source 1..45: mol_type = other DNA
ctacatgcaattctttaaccaatgtctggctaatgtaattaaagt

SEQ ID NO: 910 - DNA, 45 bp, synthetic construct
  source 1..45: mol_type = other DNA
ctttgtgattccagaacaaacatgcctcagttatagtaacatgca

SEQ ID NO: 911 - DNA, 45 bp, synthetic construct
  source 1..45: mol_type = other DNA
tattttaacaatattagatattgttaacaatttagaaaacatgaa

SEQ ID NO: 912 - DNA, 45 bp, synthetic construct
  source 1..45: mol_type = other DNA
tttcttaatatttattttgtagaagtgctggtaattttttattta

SEQ ID NO: 913 - RNA, 20 nt, synthetic construct
  source 1..20: mol_type = other RNA
tcaactatgtcaatggtttc

SEQ ID NO: 914 - RNA, 20 nt, synthetic construct
  source 1..20: mol_type = other RNA
atggccatgttcaactttac

SEQ ID NO: 915 - RNA, 20 nt, synthetic construct
  source 1..20: mol_type = other RNA
acccatattatcatattcac

SEQ ID NO: 916 - RNA, 20 nt, synthetic construct
  source 1..20: mol_type = other RNA
aataattgggaacaattaca

SEQ ID NO: 917 - RNA, 20 nt, synthetic construct
  source 1..20: mol_type = other RNA
ttagccctatgtcaatttgt

SEQ ID NO: 918 - RNA, 20 nt, synthetic construct
  source 1..20: mol_type = other RNA
tgttggatccaaacatttct

SEQ ID NO: 919 - RNA, 20 nt, synthetic construct
  source 1..20: mol_type = other RNA
aaagagataacagtttgata

SEQ ID NO: 920 - RNA, 20 nt, synthetic construct
  source 1..20: mol_type = other RNA
ggacccatattatcatattc

SEQ ID NO: 921 - RNA, 20 nt, synthetic construct
  source 1..20: mol_type = other RNA
atgggattcttagtagtatg

SEQ ID NO: 922 - RNA, 20 nt, synthetic construct
  source 1..20: mol_type = other RNA
tagccctatgtcaatttgta

SEQ ID NO: 923 - RNA, 20 nt, synthetic construct
  source 1..20: mol_type = other RNA
tgggttatcaaacacccaca

SEQ ID NO: 924 - RNA, 20 nt, synthetic construct
  source 1..20: mol_type = other RNA
gggaacaattacattaatta

SEQ ID NO: 925 - RNA, 20 nt, synthetic construct
  source 1..20: mol_type = other RNA
tctaataattgggaacaatt

SEQ ID NO: 926 - RNA, 20 nt, synthetic construct
  source 1..20: mol_type = other RNA
aaaggtagaacaaatacttt

SEQ ID NO: 927 - RNA, 20 nt, synthetic construct
  source 1..20: mol_type = other RNA
atagcagaagttatttattt

SEQ ID NO: 928 - RNA, 20 nt, synthetic construct
  source 1..20: mol_type = other RNA
ttaagcacttcaggctgtca

SEQ ID NO: 929 - RNA, 20 nt, synthetic construct
  source 1..20: mol_type = other RNA
tataacatatgggattctta

SEQ ID NO: 930 - RNA, 20 nt, synthetic construct
  source 1..20: mol_type = other RNA
tatgcaacctaataggtttg

SEQ ID NO: 931 - RNA, 20 nt, synthetic construct
  source 1..20: mol_type = other RNA
aaccacatgtctcagctata

SEQ ID NO: 932 - RNA, 20 nt, synthetic construct
  source 1..20: mol_type = other RNA
tatggaaagaatgaaagatc

SEQ ID NO: 933 - RNA, 20 nt, synthetic construct
  source 1..20: mol_type = other RNA
gagggcagaaatgaatgaac

SEQ ID NO: 934 - RNA, 20 nt, synthetic construct
  source 1..20: mol_type = other RNA
agacccatgtccatgttgta

SEQ ID NO: 935 - RNA, 20 nt, synthetic construct
  source 1..20: mol_type = other RNA
tttaatagtaacatgtattt

SEQ ID NO: 936 - RNA, 20 nt, synthetic construct
  source 1..20: mol_type = other RNA
atggctttgaaatagaagta

SEQ ID NO: 937 - RNA, 20 nt, synthetic construct
  source 1..20: mol_type = other RNA
tttaaagagataacagtttg

SEQ ID NO: 938 - RNA, 20 nt, synthetic construct
  source 1..20: mol_type = other RNA
ttgacaatgggttgatattt

SEQ ID NO: 939 - RNA, 20 nt, synthetic construct
  source 1..20: mol_type = other RNA
acagtagttgtacactgttg

SEQ ID NO: 940 - RNA, 20 nt, synthetic construct
  source 1..20: mol_type = other RNA
gtgtttatagcagaagttat

SEQ ID NO: 941 - RNA, 20 nt, synthetic construct
  source 1..20: mol_type = other RNA
taaggcaagagtagatggcc

SEQ ID NO: 942 - RNA, 20 nt, synthetic construct
  source 1..20: mol_type = other RNA
ttgtgcatatgcatatctgt

SEQ ID NO: 943 - RNA, 20 nt, synthetic construct
  source 1..20: mol_type = other RNA
aagataatctgaagcctgtt

SEQ ID NO: 944 - RNA, 20 nt, synthetic construct
  source 1..20: mol_type = other RNA
tttaaggtttctgagttaac

SEQ ID NO: 945 - RNA, 20 nt, synthetic construct
  source 1..20: mol_type = other RNA
gttggatccaaacatttcta

SEQ ID NO: 946 - RNA, 20 nt, synthetic construct
  source 1..20: mol_type = other RNA
agaagcagagaaatgtaatt

SEQ ID NO: 947 - RNA, 20 nt, synthetic construct
  source 1..20: mol_type = other RNA
tttgtattggaagtaatctg

SEQ ID NO: 948 - RNA, 20 nt, synthetic construct
  source 1..20: mol_type = other RNA
gtgcatatgcatatctgtat

SEQ ID NO: 949 - RNA, 20 nt, synthetic construct
  source 1..20: mol_type = other RNA
ttgtattggaagtaatctga

SEQ ID NO: 950 - RNA, 20 nt, synthetic construct
  source 1..20: mol_type = other RNA
actgggcaaatacacttact

SEQ ID NO: 951 - RNA, 20 nt, synthetic construct
  source 1..20: mol_type = other RNA
acaccaatcttagaagctct

SEQ ID NO: 952 - RNA, 20 nt, synthetic construct
  source 1..20: mol_type = other RNA
ttcaactatgtcaatggttt

SEQ ID NO: 953 - RNA, 20 nt, synthetic construct
  source 1..20: mol_type = other RNA
atggtttcttaatatttatt

SEQ ID NO: 954 - RNA, 20 nt, synthetic construct
  source 1..20: mol_type = other RNA
ccaaccaatttcatatttat

SEQ ID NO: 955 - RNA, 20 nt, synthetic construct
  source 1..20: mol_type = other RNA
ttaaccaatgtctgtttggc

SEQ ID NO: 956 - RNA, 20 nt, synthetic construct
  source 1..20: mol_type = other RNA
aatcttaaatcagaagcttt

SEQ ID NO: 957 - RNA, 20 nt, synthetic construct
  source 1..20: mol_type = other RNA
tgtatcactgagaagctgtt

SEQ ID NO: 958 - RNA, 20 nt, synthetic construct
  source 1..20: mol_type = other RNA
ttaagaaggataggctatag

SEQ ID NO: 959 - RNA, 20 nt, synthetic construct
  source 1..20: mol_type = other RNA
aataccaagttacatttcgt

SEQ ID NO: 960 - RNA, 20 nt, synthetic construct
  source 1..20: mol_type = other RNA
tatagcagaagttatttatt

SEQ ID NO: 961 - RNA, 20 nt, synthetic construct
  source 1..20: mol_type = other RNA
tcaactatgtcaatggtttc

SEQ ID NO: 962 - RNA, 20 nt, synthetic construct
  source 1..20: mol_type = other RNA
tttaacaatattagatattg

SEQ ID NO: 963 - RNA, 20 nt, synthetic construct
  source 1..20: mol_type = other RNA
gttggattcaaacatttcta

SEQ ID NO: 964 - RNA, 20 nt, synthetic construct
  source 1..20: mol_type = other RNA
tgttggattcaaacatttct

SEQ ID NO: 965 - RNA, 20 nt, synthetic construct
  source 1..20: mol_type = other RNA
ctaatcagttattcatttac

SEQ ID NO: 966 - RNA, 20 nt, synthetic construct
  source 1..20: mol_type = other RNA
tgcaatagaatttaaattgc

SEQ ID NO: 967 - RNA, 20 nt, synthetic construct
  source 1..20: mol_type = other RNA
tattataattataattatta

SEQ ID NO: 968 - RNA, 20 nt, synthetic construct
  source 1..20: mol_type = other RNA
tatgcaacctaataggtttg

SEQ ID NO: 969 - RNA, 20 nt, synthetic construct
  source 1..20: mol_type = other RNA
ttaagcacttcaggctgtca

SEQ ID NO: 970 - RNA, 20 nt, synthetic construct
  source 1..20: mol_type = other RNA
agcgccctctgaactgtttc

SEQ ID NO: 971 - RNA, 20 nt, synthetic construct
  source 1..20: mol_type = other RNA
ttaacaatattagatattgt

SEQ ID NO: 972 - RNA, 20 nt, synthetic construct
  source 1..20: mol_type = other RNA
ttaaagagataacggttgga

SEQ ID NO: 973 - RNA, 20 nt, synthetic construct
  source 1..20: mol_type = other RNA
tttagcattaagtcagtcca

SEQ ID NO: 974 - RNA, 20 nt, synthetic construct
  source 1..20: mol_type = other RNA
tcagttattcatttacatat

SEQ ID NO: 975 - RNA, 20 nt, synthetic construct
  source 1..20: mol_type = other RNA
gtccatagattaaagtcatt

SEQ ID NO: 976 - RNA, 20 nt, synthetic construct
  source 1..20: mol_type = other RNA
cataaagtgaatcatttctt

SEQ ID NO: 977 - RNA, 20 nt, synthetic construct
  source 1..20: mol_type = other RNA
ggccttgcaatagaatttaa

SEQ ID NO: 978 - RNA, 20 nt, synthetic construct
  source 1..20: mol_type = other RNA
gggagttgtacaaatctcta

SEQ ID NO: 979 - RNA, 20 nt, synthetic construct
  source 1..20: mol_type = other RNA
attgacaatggttgatattt

SEQ ID NO: 980 - RNA, 20 nt, synthetic construct
  source 1..20: mol_type = other RNA
tatagcagaagttatttatt

SEQ ID NO: 981 - RNA, 20 nt, synthetic construct
  source 1..20: mol_type = other RNA
accgtcaatataccttatca

SEQ ID NO: 982 - RNA, 20 nt, synthetic construct
  source 1..20: mol_type = other RNA
acggacttgtttgaagtttg

SEQ ID NO: 983 - RNA, 20 nt, synthetic construct
  source 1..20: mol_type = other RNA
ggctaatgtaattaaagttg

SEQ ID NO: 984 - RNA, 20 nt, synthetic construct
  source 1..20: mol_type = other RNA
tcagctatattattatttat

SEQ ID NO: 985 - RNA, 20 nt, synthetic construct
  source 1..20: mol_type = other RNA
tgcataagaaatgaattata

SEQ ID NO: 986 - RNA, 20 nt, synthetic construct
  source 1..20: mol_type = other RNA
tacagtagtgtacactgttg

SEQ ID NO: 987 - RNA, 20 nt, synthetic construct
  source 1..20: mol_type = other RNA
tataattataattattatta

SEQ ID NO: 988 - RNA, 20 nt, synthetic construct
  source 1..20: mol_type = other RNA
ttgtacaaatctctaatatt

SEQ ID NO: 989 - RNA, 20 nt, synthetic construct
  source 1..20: mol_type = other RNA
gtgcatatgcatatctgtat

SEQ ID NO: 990 - RNA, 20 nt, synthetic construct
  source 1..20: mol_type = other RNA
ttcaacttatatttattatt

SEQ ID NO: 991 - RNA, 20 nt, synthetic construct
  source 1..20: mol_type = other RNA
tcagcaatgcccgatagctt

SEQ ID NO: 992 - RNA, 20 nt, synthetic construct
  source 1..20: mol_type = other RNA
ttcaactatgtcaatggttt

SEQ ID NO: 993 - RNA, 20 nt, synthetic construct
  source 1..20: mol_type = other RNA
atggtttcttaatatttatt

SEQ ID NO: 994 - RNA, 20 nt, synthetic construct
  source 1..20: mol_type = other RNA
atgggaagagcaggatttat

SEQ ID NO: 995 - RNA, 20 nt, synthetic construct
  source 1..20: mol_type = other RNA
tttgccaaccttaagtcatg

SEQ ID NO: 996 - RNA, 20 nt, synthetic construct
  source 1..20: mol_type = other RNA
agtgcattgacaatggttga

SEQ ID NO: 997 - RNA, 20 nt, synthetic construct
  source 1..20: mol_type = other RNA
gctaatgtaattaaagttgt

SEQ ID NO: 998 - RNA, 20 nt, synthetic construct
  source 1..20: mol_type = other RNA
tttaagaaggataagtgata

SEQ ID NO: 999 - RNA, 20 nt, synthetic construct
  source 1..20: mol_type = other RNA
gtctatgtgacactatctct

SEQ ID NO: 1000 - RNA, 20 nt, synthetic construct
  source 1..20: mol_type = other RNA
aataccaagttacatttcgt

SEQ ID NO: 1001 - RNA, 20 nt, synthetic construct
  source 1..20: mol_type = other RNA
cttgaaaggaatatgtttgt

SEQ ID NO: 1002 - RNA, 20 nt, synthetic construct
  source 1..20: mol_type = other RNA
gtgtttatagcagaagttat

SEQ ID NO: 1003 - RNA, 20 nt, synthetic construct
  source 1..20: mol_type = other RNA
atggccttgcaatagaattt

SEQ ID NO: 1004 - RNA, 20 nt, synthetic construct
  source 1..20: mol_type = other RNA
tttgacctgtctaatcctta

SEQ ID NO: 1005 - RNA, 20 nt, synthetic construct
  source 1..20: mol_type = other RNA
taaccaatgtctggctaatg

SEQ ID NO: 1006 - RNA, 20 nt, synthetic construct
  source 1..20: mol_type = other RNA
agatattgttaacaatttag

SEQ ID NO: 1007 - RNA, 20 nt, synthetic construct
  source 1..20: mol_type = other RNA
tttgtagaagtgctggtaat

SEQ ID NO: 1008 - RNA, 21 nt, synthetic construct
  source 1..21: mol_type = other RNA
taaaccattgacatagttgtt

SEQ ID NO: 1009 - RNA, 21 nt, synthetic construct
  source 1..21: mol_type = other RNA
ttaaagttgaacatggccatt

SEQ ID NO: 1010 - RNA, 21 nt, synthetic construct
  source 1..21: mol_type = other RNA
ttgaatatgataatatgggtt

SEQ ID NO: 1011 - RNA, 21 nt, synthetic construct
  source 1..21: mol_type = other RNA
tgtaattgttcccaattattt

SEQ ID NO: 1012 - RNA, 21 nt, synthetic construct
  source 1..21: mol_type = other RNA
tcaaattgacatagggctatt

SEQ ID NO: 1013 - RNA, 21 nt, synthetic construct
  source 1..21: mol_type = other RNA
tgaaatgtttggatccaactt

SEQ ID NO: 1014 - RNA, 21 nt, synthetic construct
  source 1..21: mol_type = other RNA
tatcaaactgttatctctttt

SEQ ID NO: 1015 - RNA, 21 nt, synthetic construct
  source 1..21: mol_type = other RNA
taatatgataatatgggtctt

SEQ ID NO: 1016 - RNA, 21 nt, synthetic construct
  source 1..21: mol_type = other RNA
tatactactaagaatcccatt

SEQ ID NO: 1017 - RNA, 21 nt, synthetic construct
  source 1..21: mol_type = other RNA
tacaaattgacatagggcttt

SEQ ID NO: 1018 - RNA, 21 nt, synthetic construct
  source 1..21: mol_type = other RNA
tgtgggtgtttgataaccctt

SEQ ID NO: 1019 - RNA, 21 nt, synthetic construct
  source 1..21: mol_type = other RNA
taattaatgtaattgttcctt

SEQ ID NO: 1020 - RNA, 21 nt, synthetic construct
  source 1..21: mol_type = other RNA
tattgttcccaattattagtt

SEQ ID NO: 1021 - RNA, 21 nt, synthetic construct
  source 1..21: mol_type = other RNA
taagtatttgttctacctttt

SEQ ID NO: 1022 - RNA, 21 nt, synthetic construct
  source 1..21: mol_type = other RNA
taataaataacttctgctatt

SEQ ID NO: 1023 - RNA, 21 nt, synthetic construct
  source 1..21: mol_type = other RNA
tgacagcctgaagtgcttatt

SEQ ID NO: 1024 - RNA, 21 nt, synthetic construct
  source 1..21: mol_type = other RNA
taagaatcccatatgttattt

SEQ ID NO: 1025 - RNA, 21 nt, synthetic construct
  source 1..21: mol_type = other RNA
taaacctattaggttgcattt

SEQ ID NO: 1026 - RNA, 21 nt, synthetic construct
  source 1..21: mol_type = other RNA
tatagctgagacatgtggttt

SEQ ID NO: 1027 - RNA, 21 nt, synthetic construct
  source 1..21: mol_type = other RNA
tatctttcattctttccattt

SEQ ID NO: 1028 - RNA, 21 nt, synthetic construct
  source 1..21: mol_type = other RNA
tttcattcatttctgcccttt

SEQ ID NO: 1029 - RNA, 21 nt, synthetic construct
  source 1..21: mol_type = other RNA
tacaacatggacatgggtctt

SEQ ID NO: 1030 - RNA, 21 nt, synthetic construct
  source 1..21: mol_type = other RNA
taatacatgttactattaatt

SEQ ID NO: 1031 - RNA, 21 nt, synthetic construct
  source 1..21: mol_type = other RNA
tacttctatttcaaagccatt

SEQ ID NO: 1032 - RNA, 21 nt, synthetic construct
  source 1..21: mol_type = other RNA
taaactgttatctctttaatt

SEQ ID NO: 1033 - RNA, 21 nt, synthetic construct
  source 1..21: mol_type = other RNA
taatatcaacccattgtcatt

SEQ ID NO: 1034 - RNA, 21 nt, synthetic construct
  source 1..21: mol_type = other RNA
taacagtgtacaactactgtt

SEQ ID NO: 1035 - RNA, 21 nt, synthetic construct
  source 1..21: mol_type = other RNA
ttaacttctgctataaacatt

SEQ ID NO: 1036 - RNA, 21 nt, synthetic construct
  source 1..21: mol_type = other RNA
tgccatctactcttgcctttt

SEQ ID NO: 1037 - RNA, 21 nt, synthetic construct
  source 1..21: mol_type = other RNA
tcagatatgcatatgcacatt

SEQ ID NO: 1038 - RNA, 21 nt, synthetic construct
  source 1..21: mol_type = other RNA
tacaggcttcagattatcttt

SEQ ID NO: 1039 - RNA, 21 nt, synthetic construct
  source 1..21: mol_type = other RNA
tttaactcagaaaccttaatt

SEQ ID NO: 1040 - RNA, 21 nt, synthetic construct
  source 1..21: mol_type = other RNA
tagaaatgtttggatccaatt

SEQ ID NO: 1041 - RNA, 21 nt, synthetic construct
  source 1..21: mol_type = other RNA
tattacatttctctgcttctt

SEQ ID NO: 1042 - RNA, 21 nt, synthetic construct
  source 1..21: mol_type = other RNA
tagattacttccaatacaatt

SEQ ID NO: 1043 - RNA, 21 nt, synthetic construct
  source 1..21: mol_type = other RNA
ttacagatatgcatatgcatt

SEQ ID NO: 1044 - RNA, 21 nt, synthetic construct
  source 1..21: mol_type = other RNA
tcagattacttccaatacatt

SEQ ID NO: 1045 - RNA, 21 nt, synthetic construct
  source 1..21: mol_type = other RNA
tgtaagtgtatttgcccagtt

SEQ ID NO: 1046 - RNA, 21 nt, synthetic construct
  source 1..21: mol_type = other RNA
tgagcttctaagattggtgtt

SEQ ID NO: 1047 - RNA, 21 nt, synthetic construct
  source 1..21: mol_type = other RNA
taaccattgacatagttgatt

SEQ ID NO: 1048 - RNA, 21 nt, synthetic construct
  source 1..21: mol_type = other RNA
tataaatattaagaaaccatt

SEQ ID NO: 1049 - RNA, 21 nt, synthetic construct
  source 1..21: mol_type = other RNA
ttaaatatgaaattggttgtt

SEQ ID NO: 1050 - RNA, 21 nt, synthetic construct
  source 1..21: mol_type = other RNA
tccaaacagacattggttatt

SEQ ID NO: 1051 - RNA, 21 nt, synthetic construct
  source 1..21: mol_type = other RNA
taagcttctgatttaagattt

SEQ ID NO: 1052 - RNA, 21 nt, synthetic construct
  source 1..21: mol_type = other RNA
tacagcttctcagtgatactt

SEQ ID NO: 1053 - RNA, 21 nt, synthetic construct
  source 1..21: mol_type = other RNA
ttatagcctatccttcttatt

SEQ ID NO: 1054 - RNA, 21 nt, synthetic construct
  source 1..21: mol_type = other RNA
tcgaaatgtaacttggtattt

SEQ ID NO: 1055 - RNA, 21 nt, synthetic construct
  source 1..21: mol_type = other RNA
tataaataacttctgctattt

SEQ ID NO: 1056 - RNA, 21 nt, synthetic construct
  source 1..21: mol_type = other RNA
taaaccattgacatagttgtt

SEQ ID NO: 1057 - RNA, 21 nt, synthetic construct
  source 1..21: mol_type = other RNA
taatatctaatattgttaatt

SEQ ID NO: 1058 - RNA, 21 nt, synthetic construct
  source 1..21: mol_type = other RNA
tagaaatgtttgaatccaatt

SEQ ID NO: 1059 - RNA, 21 nt, synthetic construct
  source 1..21: mol_type = other RNA
tgaaatgtttgaatccaactt

SEQ ID NO: 1060 - RNA, 21 nt, synthetic construct
  source 1..21: mol_type = other RNA
ttaaatgaataactgattatt

SEQ ID NO: 1061 - RNA, 21 nt, synthetic construct
  source 1..21: mol_type = other RNA
tcaatttaaattctattgctt

SEQ ID NO: 1062 - RNA, 21 nt, synthetic construct
  source 1..21: mol_type = other RNA
taataattataattataattt

SEQ ID NO: 1063 - RNA, 21 nt, synthetic construct
  source 1..21: mol_type = other RNA
taaacctattaggttgcattt

SEQ ID NO: 1064 - RNA, 21 nt, synthetic construct
  source 1..21: mol_type = other RNA
tgacagcctgaagtgcttatt

SEQ ID NO: 1065 - RNA, 21 nt, synthetic construct
  source 1..21: mol_type = other RNA
taaacagttcagagggcgctt

SEQ ID NO: 1066 - RNA, 21 nt, synthetic construct
  source 1..21: mol_type = other RNA
tcaatatctaatattgttatt

SEQ ID NO: 1067 - RNA, 21 nt, synthetic construct
  source 1..21: mol_type = other RNA
tccaaccgttatctctttatt

SEQ ID NO: 1068 - RNA, 21 nt, synthetic construct
  source 1..21: mol_type = other RNA
tggactgacttaatgctaatt

SEQ ID NO: 1069 - RNA, 21 nt, synthetic construct
  source 1..21: mol_type = other RNA
ttatgtaaatgaataactgtt

SEQ ID NO: 1070 - RNA, 21 nt, synthetic construct
  source 1..21: mol_type = other RNA
tatgactttaatctatggatt

SEQ ID NO: 1071 - RNA, 21 nt, synthetic construct
  source 1..21: mol_type = other RNA
tagaaatgattcactttattt

SEQ ID NO: 1072 - RNA, 21 nt, synthetic construct
  source 1..21: mol_type = other RNA
ttaaattctattgcaaggctt

SEQ ID NO: 1073 - RNA, 21 nt, synthetic construct
  source 1..21: mol_type = other RNA
tagagatttgtacaactcctt

SEQ ID NO: 1074 - RNA, 21 nt, synthetic construct
  source 1..21: mol_type = other RNA
taatatcaaccattgtcaatt

SEQ ID NO: 1075 - RNA, 21 nt, synthetic construct
  source 1..21: mol_type = other RNA
tataaataacttctgctattt

SEQ ID NO: 1076 - RNA, 21 nt, synthetic construct
  source 1..21: mol_type = other RNA
tgataaggtatattgacggtt

SEQ ID NO: 1077 - RNA, 21 nt, synthetic construct
  source 1..21: mol_type = other RNA
taaacttcaaacaagtccgtt

SEQ ID NO: 1078 - RNA, 21 nt, synthetic construct
  source 1..21: mol_type = other RNA
taactttaattacattagctt

SEQ ID NO: 1079 - RNA, 21 nt, synthetic construct
  source 1..21: mol_type = other RNA
ttaaataataatatagctgtt

SEQ ID NO: 1080 - RNA, 21 nt, synthetic construct
  source 1..21: mol_type = other RNA
tataattcatttcttatgctt

SEQ ID NO: 1081 - RNA, 21 nt, synthetic construct
  source 1..21: mol_type = other RNA
taacagtgtacactactgttt

SEQ ID NO: 1082 - RNA, 21 nt, synthetic construct
  source 1..21: mol_type = other RNA
taataataattataattattt

SEQ ID NO: 1083 - RNA, 21 nt, synthetic construct
  source 1..21: mol_type = other RNA
tatattagagatttgtacatt

SEQ ID NO: 1084 - RNA, 21 nt, synthetic construct
  source 1..21: mol_type = other RNA
ttacagatatgcatatgcatt

SEQ ID NO: 1085 - RNA, 21 nt, synthetic construct
  source 1..21: mol_type = other RNA
tataataaatataagttgatt

SEQ ID NO: 1086 - RNA, 21 nt, synthetic construct
  source 1..21: mol_type = other RNA
tagctatcgggcattgctgtt

SEQ ID NO: 1087 - RNA, 21 nt, synthetic construct
  source 1..21: mol_type = other RNA
taaccattgacatagttgatt

SEQ ID NO: 1088 - RNA, 21 nt, synthetic construct
  source 1..21: mol_type = other RNA
tataaatattaagaaaccatt

SEQ ID NO: 1089 - RNA, 21 nt, synthetic construct
  source 1..21: mol_type = other RNA
ttaaatcctgctcttcccatt

SEQ ID NO: 1090 - RNA, 21 nt, synthetic construct
  source 1..21: mol_type = other RNA
tatgacttaaggttggcaatt

SEQ ID NO: 1091 - RNA, 21 nt, synthetic construct
  source 1..21: mol_type = other RNA
tcaaccattgtcaatgcactt

SEQ ID NO: 1092 - RNA, 21 nt, synthetic construct
  source 1..21: mol_type = other RNA
tcaactttaattacattagtt

SEQ ID NO: 1093 - RNA, 21 nt, synthetic construct
  source 1..21: mol_type = other RNA
tatcacttatccttcttaatt

SEQ ID NO: 1094 - RNA, 21 nt, synthetic construct
  source 1..21: mol_type = other RNA
tgagatagtgtcacatagatt

SEQ ID NO: 1095 - RNA, 21 nt, synthetic construct
  source 1..21: mol_type = other RNA
tcgaaatgtaacttggtattt

SEQ ID NO: 1096 - RNA, 21 nt, synthetic construct
  source 1..21: mol_type = other RNA
tcaaacatattcctttcaatt

SEQ ID NO: 1097 - RNA, 21 nt, synthetic construct
  source 1..21: mol_type = other RNA
ttaacttctgctataaacatt

SEQ ID NO: 1098 - RNA, 21 nt, synthetic construct
  source 1..21: mol_type = other RNA
taattctattgcaaggccatt

SEQ ID NO: 1099 - RNA, 21 nt, synthetic construct
  source 1..21: mol_type = other RNA
taaggattagacaggtcaatt

SEQ ID NO: 1100 - RNA, 21 nt, synthetic construct
  source 1..21: mol_type = other RNA
tattagccagacattggtttt

SEQ ID NO: 1101 - RNA, 21 nt, synthetic construct
  source 1..21: mol_type = other RNA
tataactgaggcatgtttgtt

SEQ ID NO: 1102 - RNA, 21 nt, synthetic construct
  source 1..21: mol_type = other RNA
ttaaattgttaacaatatctt

SEQ ID NO: 1103 - RNA, 21 nt, synthetic construct
  source 1..21: mol_type = other RNA
tttaccagcacttctacaatt

SEQ ID NO: 1104 - RNA, 16 nt, synthetic construct
  source 1..16: mol_type = other RNA
ctatgtcaatggttta

SEQ ID NO: 1105 - RNA, 16 nt, synthetic construct
  source 1..16: mol_type = other RNA
ccatgttcaactttaa

SEQ ID NO: 1106 - RNA, 16 nt, synthetic construct
  source 1..16: mol_type = other RNA
atattatcatattcaa

SEQ ID NO: 1107 - RNA, 16 nt, synthetic construct
  source 1..16: mol_type = other RNA
attgggaacaattaca

SEQ ID NO: 1108 - RNA, 16 nt, synthetic construct
  source 1..16: mol_type = other RNA
ccctatgtcaatttga

SEQ ID NO: 1109 - RNA, 16 nt, synthetic construct
  source 1..16: mol_type = other RNA
ggatccaaacatttca

SEQ ID NO: 1110 - RNA, 16 nt, synthetic construct
  source 1..16: mol_type = other RNA
agataacagtttgata

SEQ ID NO: 1111 - RNA, 16 nt, synthetic construct
  source 1..16: mol_type = other RNA
ccatattatcatatta

SEQ ID NO: 1112 - RNA, 16 nt, synthetic construct
  source 1..16: mol_type = other RNA
gattcttagtagtata

SEQ ID NO: 1113 - RNA, 16 nt, synthetic construct
  source 1..16: mol_type = other RNA
cctatgtcaatttgta

SEQ ID NO: 1114 - RNA, 16 nt, synthetic construct
  source 1..16: mol_type = other RNA
ttatcaaacacccaca

SEQ ID NO: 1115 - RNA, 16 nt, synthetic construct
  source 1..16: mol_type = other RNA
acaattacattaatta

SEQ ID NO: 1116 - RNA, 16 nt, synthetic construct
  source 1..16: mol_type = other RNA
ataattgggaacaata

SEQ ID NO: 1117 - RNA, 16 nt, synthetic construct
  source 1..16: mol_type = other RNA
gtagaacaaatactta

SEQ ID NO: 1118 - RNA, 16 nt, synthetic construct
  source 1..16: mol_type = other RNA
cagaagttatttatta

SEQ ID NO: 1119 - RNA, 16 nt, synthetic construct
  source 1..16: mol_type = other RNA
gcacttcaggctgtca

SEQ ID NO: 1120 - RNA, 16 nt, synthetic construct
  source 1..16: mol_type = other RNA
acatatgggattctta

SEQ ID NO: 1121 - RNA, 16 nt, synthetic construct
  source 1..16: mol_type = other RNA
caacctaataggttta

SEQ ID NO: 1122 - RNA, 16 nt, synthetic construct
  source 1..16: mol_type = other RNA
acatgtctcagctata

SEQ ID NO: 1123 - RNA, 16 nt, synthetic construct
  source 1..16: mol_type = other RNA
gaaagaatgaaagata

SEQ ID NO: 1124 - RNA, 16 nt, synthetic construct
  source 1..16: mol_type = other RNA
gcagaaatgaatgaaa

SEQ ID NO: 1125 - RNA, 16 nt, synthetic construct
  source 1..16: mol_type = other RNA
ccatgtccatgttgta

SEQ ID NO: 1126 - RNA, 16 nt, synthetic construct
  source 1..16: mol_type = other RNA
atagtaacatgtatta

SEQ ID NO: 1127 - RNA, 16 nt, synthetic construct
  source 1..16: mol_type = other RNA
ctttgaaatagaagta

SEQ ID NO: 1128 - RNA, 16 nt, synthetic construct
  source 1..16: mol_type = other RNA
aagagataacagttta

SEQ ID NO: 1129 - RNA, 16 nt, synthetic construct
  source 1..16: mol_type = other RNA
caatgggttgatatta

SEQ ID NO: 1130 - RNA, 16 nt, synthetic construct
  source 1..16: mol_type = other RNA
tagttgtacactgtta

SEQ ID NO: 1131 - RNA, 16 nt, synthetic construct
  source 1..16: mol_type = other RNA
ttatagcagaagttaa

SEQ ID NO: 1132 - RNA, 16 nt, synthetic construct
  source 1..16: mol_type = other RNA
gcaagagtagatggca

SEQ ID NO: 1133 - RNA, 16 nt, synthetic construct
  source 1..16: mol_type = other RNA
gcatatgcatatctga

SEQ ID NO: 1134 - RNA, 16 nt, synthetic construct
  source 1..16: mol_type = other RNA
taatctgaagcctgta

SEQ ID NO: 1135 - RNA, 16 nt, synthetic construct
  source 1..16: mol_type = other RNA
aggtttctgagttaaa

SEQ ID NO: 1136 - RNA, 16 nt, synthetic construct
  source 1..16: mol_type = other RNA
gatccaaacatttcta

SEQ ID NO: 1137 - RNA, 16 nt, synthetic construct
  source 1..16: mol_type = other RNA
gcagagaaatgtaata

SEQ ID NO: 1138 - RNA, 16 nt, synthetic construct
  source 1..16: mol_type = other RNA
tattggaagtaatcta

SEQ ID NO: 1139 - RNA, 16 nt, synthetic construct
  source 1..16: mol_type = other RNA
atatgcatatctgtaa

SEQ ID NO: 1140 - RNA, 16 nt, synthetic construct
  source 1..16: mol_type = other RNA
attggaagtaatctga

SEQ ID NO: 1141 - RNA, 16 nt, synthetic construct
  source 1..16: mol_type = other RNA
ggcaaatacacttaca

SEQ ID NO: 1142 - RNA, 16 nt, synthetic construct
  source 1..16: mol_type = other RNA
caatcttagaagctca

SEQ ID NO: 1143 - RNA, 16 nt, synthetic construct
  source 1..16: mol_type = other RNA
actatgtcaatggtta

SEQ ID NO: 1144 - RNA, 16 nt, synthetic construct
  source 1..16: mol_type = other RNA
tttcttaatatttata

SEQ ID NO: 1145 - RNA, 16 nt, synthetic construct
  source 1..16: mol_type = other RNA
ccaatttcatatttaa

SEQ ID NO: 1146 - RNA, 16 nt, synthetic construct
  source 1..16: mol_type = other RNA
ccaatgtctgtttgga

SEQ ID NO: 1147 - RNA, 16 nt, synthetic construct
  source 1..16: mol_type = other RNA
ttaaatcagaagctta

SEQ ID NO: 1148 - RNA, 16 nt, synthetic construct
  source 1..16: mol_type = other RNA
tcactgagaagctgta

SEQ ID NO: 1149 - RNA, 16 nt, synthetic construct
  source 1..16: mol_type = other RNA
gaaggataggctataa

SEQ ID NO: 1150 - RNA, 16 nt, synthetic construct
  source 1..16: mol_type = other RNA
ccaagttacatttcga

SEQ ID NO: 1151 - RNA, 16 nt, synthetic construct
  source 1..16: mol_type = other RNA
gcagaagttatttata

SEQ ID NO: 1152 - RNA, 16 nt, synthetic construct
  source 1..16: mol_type = other RNA
ctatgtcaatggttta

SEQ ID NO: 1153 - RNA, 16 nt, synthetic construct
  source 1..16: mol_type = other RNA
acaatattagatatta

SEQ ID NO: 1154 - RNA, 16 nt, synthetic construct
  source 1..16: mol_type = other RNA
gattcaaacatttcta

SEQ ID NO: 1155 - RNA, 16 nt, synthetic construct
  source 1..16: mol_type = other RNA
ggattcaaacatttca

SEQ ID NO: 1156 - RNA, 16 nt, synthetic construct
  source 1..16: mol_type = other RNA
tcagttattcatttaa

SEQ ID NO: 1157 - RNA, 16 nt, synthetic construct
  source 1..16: mol_type = other RNA
atagaatttaaattga

SEQ ID NO: 1158 - RNA, 16 nt, synthetic construct
  source 1..16: mol_type = other RNA
ataattataattatta

SEQ ID NO: 1159 - RNA, 16 nt, synthetic construct
  source 1..16: mol_type = other RNA
caacctaataggttta

SEQ ID NO: 1160 - RNA, 16 nt, synthetic construct
  source 1..16: mol_type = other RNA
gcacttcaggctgtca

SEQ ID NO: 1161 - RNA, 16 nt, synthetic construct
  source 1..16: mol_type = other RNA
ccctctgaactgttta

SEQ ID NO: 1162 - RNA, 16 nt, synthetic construct
  source 1..16: mol_type = other RNA
caatattagatattga

SEQ ID NO: 1163 - RNA, 16 nt, synthetic construct
  source 1..16: mol_type = other RNA
agagataacggttgga

SEQ ID NO: 1164 - RNA, 16 nt, synthetic construct
  source 1..16: mol_type = other RNA
gcattaagtcagtcca

SEQ ID NO: 1165 - RNA, 16 nt, synthetic construct
  source 1..16: mol_type = other RNA
ttattcatttacataa

SEQ ID NO: 1166 - RNA, 16 nt, synthetic construct
  source 1..16: mol_type = other RNA
atagattaaagtcata

SEQ ID NO: 1167 - RNA, 16 nt, synthetic construct
  source 1..16: mol_type = other RNA
aagtgaatcatttcta

SEQ ID NO: 1168 - RNA, 16 nt, synthetic construct
  source 1..16: mol_type = other RNA
ttgcaatagaatttaa

SEQ ID NO: 1169 - RNA, 16 nt, synthetic construct
  source 1..16: mol_type = other RNA
gttgtacaaatctcta

SEQ ID NO: 1170 - RNA, 16 nt, synthetic construct
  source 1..16: mol_type = other RNA
acaatggttgatatta

SEQ ID NO: 1171 - RNA, 16 nt, synthetic construct
  source 1..16: mol_type = other RNA
gcagaagttatttata

SEQ ID NO: 1172 - RNA, 16 nt, synthetic construct
  source 1..16: mol_type = other RNA
tcaatataccttatca

SEQ ID NO: 1173 - RNA, 16 nt, synthetic construct
  source 1..16: mol_type = other RNA
acttgtttgaagttta

SEQ ID NO: 1174 - RNA, 16 nt, synthetic construct
  source 1..16: mol_type = other RNA
aatgtaattaaagtta

SEQ ID NO: 1175 - RNA, 16 nt, synthetic construct
  source 1..16: mol_type = other RNA
ctatattattatttaa

SEQ ID NO: 1176 - RNA, 16 nt, synthetic construct
  source 1..16: mol_type = other RNA
taagaaatgaattata

SEQ ID NO: 1177 - RNA, 16 nt, synthetic construct
  source 1..16: mol_type = other RNA
gtagtgtacactgtta

SEQ ID NO: 1178 - RNA, 16 nt, synthetic construct
  source 1..16: mol_type = other RNA
attataattattatta

SEQ ID NO: 1179 - RNA, 16 nt, synthetic construct
  source 1..16: mol_type = other RNA
acaaatctctaatata

SEQ ID NO: 1180 - RNA, 16 nt, synthetic construct
  source 1..16: mol_type = other RNA
atatgcatatctgtaa

SEQ ID NO: 1181 - RNA, 16 nt, synthetic construct
  source 1..16: mol_type = other RNA
acttatatttattata

SEQ ID NO: 1182 - RNA, 16 nt, synthetic construct
  source 1..16: mol_type = other RNA
caatgcccgatagcta

SEQ ID NO: 1183 - RNA, 16 nt, synthetic construct
  source 1..16: mol_type = other RNA
actatgtcaatggtta

SEQ ID NO: 1184 - RNA, 16 nt, synthetic construct
  source 1..16: mol_type = other RNA
tttcttaatatttata

SEQ ID NO: 1185 - RNA, 16 nt, synthetic construct
  source 1..16: mol_type = other RNA
gaagagcaggatttaa

SEQ ID NO: 1186 - RNA, 16 nt, synthetic construct
  source 1..16: mol_type = other RNA
ccaaccttaagtcata

SEQ ID NO: 1187 - RNA, 16 nt, synthetic construct
  source 1..16: mol_type = other RNA
cattgacaatggttga

SEQ ID NO: 1188 - RNA, 16 nt, synthetic construct
  source 1..16: mol_type = other RNA
atgtaattaaagttga

SEQ ID NO: 1189 - RNA, 16 nt, synthetic construct
  source 1..16: mol_type = other RNA
agaaggataagtgata

SEQ ID NO: 1190 - RNA, 16 nt, synthetic construct
  source 1..16: mol_type = other RNA
atgtgacactatctca

SEQ ID NO: 1191 - RNA, 16 nt, synthetic construct
  source 1..16: mol_type = other RNA
ccaagttacatttcga

SEQ ID NO: 1192 - RNA, 16 nt, synthetic construct
  source 1..16: mol_type = other RNA
aaaggaatatgtttga

SEQ ID NO: 1193 - RNA, 16 nt, synthetic construct
  source 1..16: mol_type = other RNA
ttatagcagaagttaa

SEQ ID NO: 1194 - RNA, 16 nt, synthetic construct
  source 1..16: mol_type = other RNA
ccttgcaatagaatta

SEQ ID NO: 1195 - RNA, 16 nt, synthetic construct
  source 1..16: mol_type = other RNA
acctgtctaatcctta

SEQ ID NO: 1196 - RNA, 16 nt, synthetic construct
  source 1..16: mol_type = other RNA
caatgtctggctaata

SEQ ID NO: 1197 - RNA, 16 nt, synthetic construct
  source 1..16: mol_type = other RNA
acatgcctcagttata

SEQ ID NO: 1198 - RNA, 16 nt, synthetic construct
  source 1..16: mol_type = other RNA
attgttaacaatttaa

SEQ ID NO: 1199 - RNA, 16 nt, synthetic construct
  source 1..16: mol_type = other RNA
tagaagtgctggtaaa

SEQ ID NO: 1200 - DNA, 45 bp, synthetic construct
  source 1..45: mol_type = other DNA
ttactcaaaagcaaaaagaagaaataagaacaagggaaaaaaaaa

SEQ ID NO: 1201 - DNA, 45 bp, synthetic construct
  source 1..45: mol_type = other DNA
tggaaaaagaggggctgtgtaatgcatgtgcgtggagacaaaaca

SEQ ID NO: 1202 - DNA, 45 bp, synthetic construct
  source 1..45: mol_type = other DNA
agacaaaacacgaggtactccagaatagaagccataaaaattcaa

SEQ ID NO: 1203 - DNA, 45 bp, synthetic construct
  source 1..45: mol_type = other DNA
tttctaatgcaagcggatggcaagcccaaatgttgcttttttaaa

SEQ ID NO: 1204 - DNA, 45 bp, synthetic construct
  source 1..45: mol_type = other DNA
ttctaatgcaagcggatggcaagcccaaatgttgcttttttaaat

SEQ ID NO: 1205 - DNA, 45 bp, synthetic construct
  source 1..45: mol_type = other DNA
atatctcagacccgtcaagactcctacaacagtgtttgtgcaaat

SEQ ID NO: 1206 - DNA, 45 bp, synthetic construct
  source 1..45: mol_type = other DNA
gcaaaattggctcaaacagcctgaatccaacttaggcattgaaat

SEQ ID NO: 1207 - DNA, 45 bp, synthetic construct
  source 1..45: mol_type = other DNA
tcgattttgaagcctttggatgggactggattatcgcacccaaaa

SEQ ID NO: 1208 - DNA, 45 bp, synthetic construct
  source 1..45: mol_type = other DNA
agatataaggccaattactgctcaggagagtgtgaatttgtgttt

SEQ ID NO: 1209 - DNA, 45 bp, synthetic construct
  source 1..45: mol_type = other DNA
aaggccaattactgctcaggagagtgtgaatttgtgtttttacaa

SEQ ID NO: 1210 - DNA, 45 bp, synthetic construct
  source 1..45: mol_type = other DNA
aggccaattactgctcaggagagtgtgaatttgtgtttttacaaa

SEQ ID NO: 1211 - DNA, 45 bp, synthetic construct
  source 1..45: mol_type = other DNA
ccgacaaaaatgtctcccattaatatgctatattttaatggcaaa

SEQ ID NO: 1212 - DNA, 45 bp, synthetic construct
  source 1..45: mol_type = other DNA
aatatgctatattttaatggcaaagaacaaataatatatgggaaa

SEQ ID NO: 1213 - DNA, 45 bp, synthetic construct
  source 1..45: mol_type = other DNA
atatgctatattttaatggcaaagaacaaataatatatgggaaaa

SEQ ID NO: 1214 - DNA, 45 bp, synthetic construct
  source 1..45: mol_type = other DNA
atgctatattttaatggcaaagaacaaataatatatgggaaaatt

SEQ ID NO: 1215 - DNA, 45 bp, synthetic construct
  source 1..45: mol_type = other DNA
ggtgctcatgagctttgcattaggttagaaatttcccaagtcatg

SEQ ID NO: 1216 - DNA, 45 bp, synthetic construct
  source 1..45: mol_type = other DNA
ttcgaaactgtgaattcaagcaccacaggctgtaggccttgagta

SEQ ID NO: 1217 - DNA, 45 bp, synthetic construct
  source 1..45: mol_type = other DNA
tgctctagtaacgtaagcacaagctacagtgtatgaactaaaaga

SEQ ID NO: 1218 - DNA, 45 bp, synthetic construct
  source 1..45: mol_type = other DNA
agaatagatgcaatggttggcattcaaccaccaaaataaaccata

SEQ ID NO: 1219 - DNA, 45 bp, synthetic construct
  source 1..45: mol_type = other DNA
aaataaaccatactataggatgttgtatgatttccagagtttttg

SEQ ID NO: 1220 - DNA, 45 bp, synthetic construct
  source 1..45: mol_type = other DNA
aaccatactataggatgttgtatgatttccagagtttttgaaata

SEQ ID NO: 1221 - DNA, 45 bp, synthetic construct
  source 1..45: mol_type = other DNA
gagtttttgaaatagatggagatcaaattacatttatgtccatat

SEQ ID NO: 1222 - DNA, 45 bp, synthetic construct
  source 1..45: mol_type = other DNA
ttttgaaatagatggagatcaaattacatttatgtccatatatgt

SEQ ID NO: 1223 - DNA, 45 bp, synthetic construct
  source 1..45: mol_type = other DNA
atgattaaaaggtaaagtcttatttcctaacagtttcacttaata

SEQ ID NO: 1224 - DNA, 45 bp, synthetic construct
  source 1..45: mol_type = other DNA
gattaaaaggtaaagtcttatttcctaacagtttcacttaatatt

SEQ ID NO: 1225 - DNA, 45 bp, synthetic construct
  source 1..45: mol_type = other DNA
attaaaaggtaaagtcttatttcctaacagtttcacttaatattt

SEQ ID NO: 1226 - DNA, 45 bp, synthetic construct
  source 1..45: mol_type = other DNA
gtttcacttaatatttacggaagaatctatatgtagcctttgtaa

SEQ ID NO: 1227 - DNA, 45 bp, synthetic construct
  source 1..45: mol_type = other DNA
tttcacttaatatttacggaagaatctatatgtagcctttgtaaa

SEQ ID NO: 1228 - DNA, 45 bp, synthetic construct
  source 1..45: mol_type = other DNA
tcacttaatatttacggaagaatctatatgtagcctttgtaaagt

SEQ ID NO: 1229 - DNA, 45 bp, synthetic construct
  source 1..45: mol_type = other DNA
atctatatgtagcctttgtaaagtgtaggattgttatcatttaaa

SEQ ID NO: 1230 - DNA, 45 bp, synthetic construct
  source 1..45: mol_type = other DNA
tctatatgtagcctttgtaaagtgtaggattgttatcatttaaaa

SEQ ID NO: 1231 - DNA, 45 bp, synthetic construct
  source 1..45: mol_type = other DNA
atcatttaaaaacatcatgtacacttatatttgtattgtatactt

SEQ ID NO: 1232 - DNA, 45 bp, synthetic construct
  source 1..45: mol_type = other DNA
ttaaaaacatcatgtacacttatatttgtattgtatacttggtaa

SEQ ID NO: 1233 - DNA, 45 bp, synthetic construct
  source 1..45: mol_type = other DNA
atcatgtacacttatatttgtattgtatacttggtaagataaaat

SEQ ID NO: 1234 - DNA, 45 bp, synthetic construct
  source 1..45: mol_type = other DNA
tcatgtacacttatatttgtattgtatacttggtaagataaaatt

SEQ ID NO: 1235 - DNA, 45 bp, synthetic construct
  source 1..45: mol_type = other DNA
cttggtaagataaaattccacaaagtaggaatggggccttacata

SEQ ID NO: 1236 - DNA, 45 bp, synthetic construct
  source 1..45: mol_type = other DNA
ttcaatgcattttctttaaggaaagaagaatctttttttctagag

SEQ ID NO: 1237 - DNA, 45 bp, synthetic construct
  source 1..45: mol_type = other DNA
actgctgcatcttaaaaggcagccaaacagtattcattttttaat

SEQ ID NO: 1238 - DNA, 45 bp, synthetic construct
  source 1..45: mol_type = other DNA
atttcaaaatcactgtctgcctttatcacatggcaattttgtggt

SEQ ID NO: 1239 - DNA, 45 bp, synthetic construct
  source 1..45: mol_type = other DNA
ttttgtggtaaaataatggaaatgactggttctatcaatattgta

SEQ ID NO: 1240 - DNA, 45 bp, synthetic construct
  source 1..45: mol_type = other DNA
atcaatattgtataaaagactctgaaacaattacatttatataat

SEQ ID NO: 1241 - DNA, 45 bp, synthetic construct
  source 1..45: mol_type = other DNA
tattgtataaaagactctgaaacaattacatttatataatatgta

SEQ ID NO: 1242 - DNA, 45 bp, synthetic construct
  source 1..45: mol_type = other DNA
attgtataaaagactctgaaacaattacatttatataatatgtat

SEQ ID NO: 1243 - DNA, 45 bp, synthetic construct
  source 1..45: mol_type = other DNA
ttgtataaaagactctgaaacaattacatttatataatatgtata

SEQ ID NO: 1244 - DNA, 45 bp, synthetic construct
  source 1..45: mol_type = other DNA
gactctgaaacaattacatttatataatatgtatacaatattgtt

SEQ ID NO: 1245 - DNA, 45 bp, synthetic construct
  source 1..45: mol_type = other DNA
aacaattacatttatataatatgtatacaatattgttttgtaaat

SEQ ID NO: 1246 - DNA, 45 bp, synthetic construct
  source 1..45: mol_type = other DNA
acaattacatttatataatatgtatacaatattgttttgtaaata

SEQ ID NO: 1247 - DNA, 45 bp, synthetic construct
  source 1..45: mol_type = other DNA
attacatttatataatatgtatacaatattgttttgtaaataagt

SEQ ID NO: 1248 - DNA, 45 bp, synthetic construct
  source 1..45: mol_type = other DNA
atatgtatacaatattgttttgtaaataagtgtctccttttatat

SEQ ID NO: 1249 - DNA, 45 bp, synthetic construct
  source 1..45: mol_type = other DNA
atgtatacaatattgttttgtaaataagtgtctccttttatattt

SEQ ID NO: 1250 - DNA, 45 bp, synthetic construct
  source 1..45: mol_type = other DNA
tgtatacaatattgttttgtaaataagtgtctccttttatattta

SEQ ID NO: 1251 - DNA, 45 bp, synthetic construct
  source 1..45: mol_type = other DNA
gtatacaatattgttttgtaaataagtgtctccttttatatttac

SEQ ID NO: 1252 - DNA, 45 bp, synthetic construct
  source 1..45: mol_type = other DNA
atacaatattgttttgtaaataagtgtctccttttatatttactt

SEQ ID NO: 1253 - DNA, 45 bp, synthetic construct
  source 1..45: mol_type = other DNA
tttactttggtatatttttacactaatgaaatttcaaatcattaa

SEQ ID NO: 1254 - DNA, 45 bp, synthetic construct
  source 1..45: mol_type = other DNA
ttactttggtatatttttacactaatgaaatttcaaatcattaaa

SEQ ID NO: 1255 - DNA, 45 bp, synthetic construct
  source 1..45: mol_type = other DNA
tactttggtatatttttacactaatgaaatttcaaatcattaaag

SEQ ID NO: 1256 - DNA, 45 bp, synthetic construct
  source 1..45: mol_type = other DNA
gtatatttttacactaatgaaatttcaaatcattaaagtacaaag

SEQ ID NO: 1257 - DNA, 45 bp, synthetic construct
  source 1..45: mol_type = other DNA
acactaatgaaatttcaaatcattaaagtacaaagacatgtcatg

SEQ ID NO: 1258 - DNA, 45 bp, synthetic construct
  source 1..45: mol_type = other DNA
tctatttcagagtgaattagcagattcaatagtggtcttaaaact

SEQ ID NO: 1259 - DNA, 45 bp, synthetic construct
  source 1..45: mol_type = other DNA
tatttcagagtgaattagcagattcaatagtggtcttaaaactct

SEQ ID NO: 1260 - DNA, 45 bp, synthetic construct
  source 1..45: mol_type = other DNA
ggtcttaaaactctgtatgttaagattagaaggttatattacaat

SEQ ID NO: 1261 - DNA, 45 bp, synthetic construct
  source 1..45: mol_type = other DNA
cttaaaactctgtatgttaagattagaaggttatattacaatcaa

SEQ ID NO: 1262 - DNA, 45 bp, synthetic construct
  source 1..45: mol_type = other DNA
taaaactctgtatgttaagattagaaggttatattacaatcaatt

SEQ ID NO: 1263 - DNA, 45 bp, synthetic construct
  source 1..45: mol_type = other DNA
gtatgttaagattagaaggttatattacaatcaatttatgtattt

SEQ ID NO: 1264 - DNA, 45 bp, synthetic construct
  source 1..45: mol_type = other DNA
atgttaagattagaaggttatattacaatcaatttatgtattttt

SEQ ID NO: 1265 - DNA, 45 bp, synthetic construct
  source 1..45: mol_type = other DNA
gttaagattagaaggttatattacaatcaatttatgtatttttta

SEQ ID NO: 1266 - DNA, 45 bp, synthetic construct
  source 1..45: mol_type = other DNA
aagattagaaggttatattacaatcaatttatgtattttttacat

SEQ ID NO: 1267 - DNA, 45 bp, synthetic construct
  source 1..45: mol_type = other DNA
agattagaaggttatattacaatcaatttatgtattttttacatt

SEQ ID NO: 1268 - DNA, 45 bp, synthetic construct
  source 1..45: mol_type = other DNA
tcaatttatgtattttttacattatcaacattcacttatggtttc

SEQ ID NO: 1269 - DNA, 45 bp, synthetic construct
  source 1..45: mol_type = other DNA
aaaaattacaagcattactaaacataccaacatgtatctaaagaa

SEQ ID NO: 1270 - DNA, 45 bp, synthetic construct
  source 1..45: mol_type = other DNA
aaattacaagcattactaaacataccaacatgtatctaaagaaat

SEQ ID NO: 1271 - DNA, 45 bp, synthetic construct
  source 1..45: mol_type = other DNA
agcattactaaacataccaacatgtatctaaagaaatacaaatat

SEQ ID NO: 1272 - DNA, 45 bp, synthetic construct
  source 1..45: mol_type = other DNA
acatgtatctaaagaaatacaaatatggtatctcaataacagcta

SEQ ID NO: 1273 - DNA, 45 bp, synthetic construct
  source 1..45: mol_type = other DNA
ctaaagaaatacaaatatggtatctcaataacagctactttttta

SEQ ID NO: 1274 - DNA, 45 bp, synthetic construct
  source 1..45: mol_type = other DNA
gaaatacaaatatggtatctcaataacagctacttttttatttta

SEQ ID NO: 1275 - DNA, 45 bp, synthetic construct
  source 1..45: mol_type = other DNA
aaatacaaatatggtatctcaataacagctacttttttattttat

SEQ ID NO: 1276 - DNA, 45 bp, synthetic construct
  source 1..45: mol_type = other DNA
aatacaaatatggtatctcaataacagctacttttttattttata

SEQ ID NO: 1277 - DNA, 45 bp, synthetic construct
  source 1..45: mol_type = other DNA
cagctacttttttattttataatttgacaatgaatacatttcttt

SEQ ID NO: 1278 - DNA, 45 bp, synthetic construct
  source 1..45: mol_type = other DNA
ttttttattttataatttgacaatgaatacatttcttttatttac

SEQ ID NO: 1279 - DNA, 45 bp, synthetic construct
  source 1..45: mol_type = other DNA
tttttattttataatttgacaatgaatacatttcttttatttact

SEQ ID NO: 1280 - DNA, 45 bp, synthetic construct
  source 1..45: mol_type = other DNA
ttttattttataatttgacaatgaatacatttcttttatttactt

SEQ ID NO: 1281 - DNA, 45 bp, synthetic construct
  source 1..45: mol_type = other DNA
ttttatttacttcagttttataaattggaactttgtttatcaaat

SEQ ID NO: 1282 - DNA, 45 bp, synthetic construct
  source 1..45: mol_type = other DNA
tttatttacttcagttttataaattggaactttgtttatcaaatg

SEQ ID NO: 1283 - DNA, 45 bp, synthetic construct
  source 1..45: mol_type = other DNA
ttatttacttcagttttataaattggaactttgtttatcaaatgt

SEQ ID NO: 1284 - DNA, 45 bp, synthetic construct
  source 1..45: mol_type = other DNA
ttcagttttataaattggaactttgtttatcaaatgtattgtact

SEQ ID NO: 1285 - DNA, 45 bp, synthetic construct
  source 1..45: mol_type = other DNA
tttatcaaatgtattgtactcatagctaaatgaaattatttctta

SEQ ID NO: 1286 - DNA, 45 bp, synthetic construct
  source 1..45: mol_type = other DNA
aaatgtattgtactcatagctaaatgaaattatttcttacataaa

SEQ ID NO: 1287 - DNA, 45 bp, synthetic construct
  source 1..45: mol_type = other DNA
atgtattgtactcatagctaaatgaaattatttcttacataaaaa

SEQ ID NO: 1288 - RNA, 20 nt, synthetic construct
  source 1..20: mol_type = other RNA
aagaagaaataagaacaagg

SEQ ID NO: 1289 - RNA, 20 nt, synthetic construct
  source 1..20: mol_type = other RNA
tgtgtaatgcatgtgcgtgg

SEQ ID NO: 1290 - RNA, 20 nt, synthetic construct
  source 1..20: mol_type = other RNA
tactccagaatagaagccat

SEQ ID NO: 1291 - RNA, 20 nt, synthetic construct
  source 1..20: mol_type = other RNA
gatggcaagcccaaatgttg

SEQ ID NO: 1292 - RNA, 20 nt, synthetic construct
  source 1..20: mol_type = other RNA
atggcaagcccaaatgttgc

SEQ ID NO: 1293 - RNA, 20 nt, synthetic construct
  source 1..20: mol_type = other RNA
caagactcctacaacagtgt

SEQ ID NO: 1294 - RNA, 20 nt, synthetic construct
  source 1..20: mol_type = other RNA
acagcctgaatccaacttag

SEQ ID NO: 1295 - RNA, 20 nt, synthetic construct
  source 1..20: mol_type = other RNA
ttggatgggactggattatc

SEQ ID NO: 1296 - RNA, 20 nt, synthetic construct
  source 1..20: mol_type = other RNA
tactgctcaggagagtgtga

SEQ ID NO: 1297 - RNA, 20 nt, synthetic construct
  source 1..20: mol_type = other RNA
tcaggagagtgtgaatttgt

SEQ ID NO: 1298 - RNA, 20 nt, synthetic construct
  source 1..20: mol_type = other RNA
caggagagtgtgaatttgtg

SEQ ID NO: 1299 - RNA, 20 nt, synthetic construct
  source 1..20: mol_type = other RNA
cccattaatatgctatattt

SEQ ID NO: 1300 - RNA, 20 nt, synthetic construct
  source 1..20: mol_type = other RNA
aatggcaaagaacaaataat

SEQ ID NO: 1301 - RNA, 20 nt, synthetic construct
  source 1..20: mol_type = other RNA
atggcaaagaacaaataata

SEQ ID NO: 1302 - RNA, 20 nt, synthetic construct
  source 1..20: mol_type = other RNA
ggcaaagaacaaataatata

SEQ ID NO: 1303 - RNA, 20 nt, synthetic construct
  source 1..20: mol_type = other RNA
tgcattaggttagaaatttc

SEQ ID NO: 1304 - RNA, 20 nt, synthetic construct
  source 1..20: mol_type = other RNA
tcaagcaccacaggctgtag

SEQ ID NO: 1305 - RNA, 20 nt, synthetic construct
  source 1..20: mol_type = other RNA
agcacaagctacagtgtatg

SEQ ID NO: 1306 - RNA, 20 nt, synthetic construct
  source 1..20: mol_type = other RNA
gttggcattcaaccaccaaa

SEQ ID NO: 1307 - RNA, 20 nt, synthetic construct
  source 1..20: mol_type = other RNA
taggatgttgtatgatttcc

SEQ ID NO: 1308 - RNA, 20 nt, synthetic construct
  source 1..20: mol_type = other RNA
tgttgtatgatttccagagt

SEQ ID NO: 1309 - RNA, 20 nt, synthetic construct
  source 1..20: mol_type = other RNA
atggagatcaaattacattt

SEQ ID NO: 1310 - RNA, 20 nt, synthetic construct
  source 1..20: mol_type = other RNA
agatcaaattacatttatgt

SEQ ID NO: 1311 - RNA, 20 nt, synthetic construct
  source 1..20: mol_type = other RNA
agtcttatttcctaacagtt

SEQ ID NO: 1312 - RNA, 20 nt, synthetic construct
  source 1..20: mol_type = other RNA
tcttatttcctaacagtttc

SEQ ID NO: 1313 - RNA, 20 nt, synthetic construct
  source 1..20: mol_type = other RNA
cttatttcctaacagtttca

SEQ ID NO: 1314 - RNA, 20 nt, synthetic construct
  source 1..20: mol_type = other RNA
tacggaagaatctatatgta

SEQ ID NO: 1315 - RNA, 20 nt, synthetic construct
  source 1..20: mol_type = other RNA
acggaagaatctatatgtag

SEQ ID NO: 1316 - RNA, 20 nt, synthetic construct
  source 1..20: mol_type = other RNA
ggaagaatctatatgtagcc

SEQ ID NO: 1317 - RNA, 20 nt, synthetic construct
  source 1..20: mol_type = other RNA
ttgtaaagtgtaggattgtt

SEQ ID NO: 1318 - RNA, 20 nt, synthetic construct
  source 1..20: mol_type = other RNA
tgtaaagtgtaggattgtta

SEQ ID NO: 1319 - RNA, 20 nt, synthetic construct
  source 1..20: mol_type = other RNA
catgtacacttatatttgta

SEQ ID NO: 1320 - RNA, 20 nt, synthetic construct
  source 1..20: mol_type = other RNA
acacttatatttgtattgta

SEQ ID NO: 1321 - RNA, 20 nt, synthetic construct
  source 1..20: mol_type = other RNA
atttgtattgtatacttggt

SEQ ID NO: 1322 - RNA, 20 nt, synthetic construct
  source 1..20: mol_type = other RNA
tttgtattgtatacttggta

SEQ ID NO: 1323 - RNA, 20 nt, synthetic construct
  source 1..20: mol_type = other RNA
ttccacaaagtaggaatggg

SEQ ID NO: 1324 - RNA, 20 nt, synthetic construct
  source 1..20: mol_type = other RNA
ttaaggaaagaagaatcttt

SEQ ID NO: 1325 - RNA, 20 nt, synthetic construct
  source 1..20: mol_type = other RNA
aaggcagccaaacagtattc

SEQ ID NO: 1326 - RNA, 20 nt, synthetic construct
  source 1..20: mol_type = other RNA
tctgcctttatcacatggca

SEQ ID NO: 1327 - RNA, 20 nt, synthetic construct
  source 1..20: mol_type = other RNA
atggaaatgactggttctat

SEQ ID NO: 1328 - RNA, 20 nt, synthetic construct
  source 1..20: mol_type = other RNA
aagactctgaaacaattaca

SEQ ID NO: 1329 - RNA, 20 nt, synthetic construct
  source 1..20: mol_type = other RNA
tctgaaacaattacatttat

SEQ ID NO: 1330 - RNA, 20 nt, synthetic construct
  source 1..20: mol_type = other RNA
ctgaaacaattacatttata

SEQ ID NO: 1331 - RNA, 20 nt, synthetic construct
  source 1..20: mol_type = other RNA
tgaaacaattacatttatat

SEQ ID NO: 1332 - RNA, 20 nt, synthetic construct
  source 1..20: mol_type = other RNA
acatttatataatatgtata

SEQ ID NO: 1333 - RNA, 20 nt, synthetic construct
  source 1..20: mol_type = other RNA
ataatatgtatacaatattg

SEQ ID NO: 1334 - RNA, 20 nt, synthetic construct
  source 1..20: mol_type = other RNA
taatatgtatacaatattgt

SEQ ID NO: 1335 - RNA, 20 nt, synthetic construct
  source 1..20: mol_type = other RNA
tatgtatacaatattgtttt

SEQ ID NO: 1336 - RNA, 20 nt, synthetic construct
  source 1..20: mol_type = other RNA
tgttttgtaaataagtgtct

SEQ ID NO: 1337 - RNA, 20 nt, synthetic construct
  source 1..20: mol_type = other RNA
ttttgtaaataagtgtctcc

SEQ ID NO: 1338 - RNA, 20 nt, synthetic construct
  source 1..20: mol_type = other RNA
tttgtaaataagtgtctcct

SEQ ID NO: 1339 - RNA, 20 nt, synthetic construct
  source 1..20: mol_type = other RNA
ttgtaaataagtgtctcctt

SEQ ID NO: 1340 - RNA, 20 nt, synthetic construct
  source 1..20: mol_type = other RNA
gtaaataagtgtctcctttt

SEQ ID NO: 1341 - RNA, 20 nt, synthetic construct
  source 1..20: mol_type = other RNA
ttttacactaatgaaatttc

SEQ ID NO: 1342 - RNA, 20 nt, synthetic construct
  source 1..20: mol_type = other RNA
tttacactaatgaaatttca

SEQ ID NO: 1343 - RNA, 20 nt, synthetic construct
  source 1..20: mol_type = other RNA
ttacactaatgaaatttcaa

SEQ ID NO: 1344 - RNA, 20 nt, synthetic construct
  source 1..20: mol_type = other RNA
aatgaaatttcaaatcatta

SEQ ID NO: 1345 - RNA, 20 nt, synthetic construct
  source 1..20: mol_type = other RNA
caaatcattaaagtacaaag

SEQ ID NO: 1346 - RNA, 20 nt, synthetic construct
  source 1..20: mol_type = other RNA
attagcagattcaatagtgg

SEQ ID NO: 1347 - RNA, 20 nt, synthetic construct
  source 1..20: mol_type = other RNA
tagcagattcaatagtggtc

SEQ ID NO: 1348 - RNA, 20 nt, synthetic construct
  source 1..20: mol_type = other RNA
tatgttaagattagaaggtt

SEQ ID NO: 1349 - RNA, 20 nt, synthetic construct
  source 1..20: mol_type = other RNA
gttaagattagaaggttata

SEQ ID NO: 1350 - RNA, 20 nt, synthetic construct
  source 1..20: mol_type = other RNA
taagattagaaggttatatt

SEQ ID NO: 1351 - RNA, 20 nt, synthetic construct
  source 1..20: mol_type = other RNA
aaggttatattacaatcaat

SEQ ID NO: 1352 - RNA, 20 nt, synthetic construct
  source 1..20: mol_type = other RNA
ggttatattacaatcaattt

SEQ ID NO: 1353 - RNA, 20 nt, synthetic construct
  source 1..20: mol_type = other RNA
ttatattacaatcaatttat

SEQ ID NO: 1354 - RNA, 20 nt, synthetic construct
  source 1..20: mol_type = other RNA
tattacaatcaatttatgta

SEQ ID NO: 1355 - RNA, 20 nt, synthetic construct
  source 1..20: mol_type = other RNA
attacaatcaatttatgtat

SEQ ID NO: 1356 - RNA, 20 nt, synthetic construct
  source 1..20: mol_type = other RNA
tttacattatcaacattcac

SEQ ID NO: 1357 - RNA, 20 nt, synthetic construct
  source 1..20: mol_type = other RNA
tactaaacataccaacatgt

SEQ ID NO: 1358 - RNA, 20 nt, synthetic construct
  source 1..20: mol_type = other RNA
ctaaacataccaacatgtat

SEQ ID NO: 1359 - RNA, 20 nt, synthetic construct
  source 1..20: mol_type = other RNA
accaacatgtatctaaagaa

SEQ ID NO: 1360 - RNA, 20 nt, synthetic construct
  source 1..20: mol_type = other RNA
aatacaaatatggtatctca

SEQ ID NO: 1361 - RNA, 20 nt, synthetic construct
  source 1..20: mol_type = other RNA
tatggtatctcaataacagc

SEQ ID NO: 1362 - RNA, 20 nt, synthetic construct
  source 1..20: mol_type = other RNA
tatctcaataacagctactt

SEQ ID NO: 1363 - RNA, 20 nt, synthetic construct
  source 1..20: mol_type = other RNA
atctcaataacagctacttt

SEQ ID NO: 1364 - RNA, 20 nt, synthetic construct
  source 1..20: mol_type = other RNA
tctcaataacagctactttt

SEQ ID NO: 1365 - RNA, 20 nt, synthetic construct
  source 1..20: mol_type = other RNA
tttataatttgacaatgaat

SEQ ID NO: 1366 - RNA, 20 nt, synthetic construct
  source 1..20: mol_type = other RNA
tttgacaatgaatacatttc

SEQ ID NO: 1367 - RNA, 20 nt, synthetic construct
  source 1..20: mol_type = other RNA
ttgacaatgaatacatttct

SEQ ID NO: 1368 - RNA, 20 nt, synthetic construct
  source 1..20: mol_type = other RNA
tgacaatgaatacatttctt

SEQ ID NO: 1369 - RNA, 20 nt, synthetic construct
  source 1..20: mol_type = other RNA
ttttataaattggaactttg

SEQ ID NO: 1370 - RNA, 20 nt, synthetic construct
  source 1..20: mol_type = other RNA
tttataaattggaactttgt

SEQ ID NO: 1371 - RNA, 20 nt, synthetic construct
  source 1..20: mol_type = other RNA
ttataaattggaactttgtt

SEQ ID NO: 1372 - RNA, 20 nt, synthetic construct
  source 1..20: mol_type = other RNA
tggaactttgtttatcaaat

SEQ ID NO: 1373 - RNA, 20 nt, synthetic construct
  source 1..20: mol_type = other RNA
gtactcatagctaaatgaaa

SEQ ID NO: 1374 - RNA, 20 nt, synthetic construct
  source 1..20: mol_type = other RNA
atagctaaatgaaattattt

SEQ ID NO: 1375 - RNA, 20 nt, synthetic construct
  source 1..20: mol_type = other RNA
agctaaatgaaattatttct

SEQ ID NO: 1376 - DNA, 45 bp, synthetic construct
  source 1..45: mol_type = other DNA
tggaaaaagaggggctgtgtaatgcatgtacttggagacaaaaca

SEQ ID NO: 1377 - DNA, 45 bp, synthetic construct
  source 1..45: mol_type = other DNA
caaaacactaaatcttcaagaatagaagccattaagatacaaatc

SEQ ID NO: 1378 - DNA, 45 bp, synthetic construct
  source 1..45: mol_type = other DNA
tcttcaagaatagaagccattaagatacaaatcctcagtaaactt

SEQ ID NO: 1379 - DNA, 45 bp, synthetic construct
  source 1..45: mol_type = other DNA
ctggaaacagctcctaacatcagcaaagatgttataagacaactt

SEQ ID NO: 1380 - DNA, 45 bp, synthetic construct
  source 1..45: mol_type = other DNA
gatggaaaacccaaatgttgcttctttaaatttagctctaaaata

SEQ ID NO: 1381 - DNA, 45 bp, synthetic construct
  source 1..45: mol_type = other DNA
tacaatacaataaagtagtaaaggcccaactatggatatatttga

SEQ ID NO: 1382 - DNA, 45 bp, synthetic construct
  source 1..45: mol_type = other DNA
atatttgagacccgtcgagactcctacaacagtgtttgtgcaaat

SEQ ID NO: 1383 - DNA, 45 bp, synthetic construct
  source 1..45: mol_type = other DNA
ttgagacccgtcgagactcctacaacagtgtttgtgcaaatcctg

SEQ ID NO: 1384 - DNA, 45 bp, synthetic construct
  source 1..45: mol_type = other DNA
atttggcagagcattgatgtgaagacagtgttgcaaaattggctc

SEQ ID NO: 1385 - DNA, 45 bp, synthetic construct
  source 1..45: mol_type = other DNA
gactgtgatgagcactcaacagaatcacgatgctgtcgttaccct

SEQ ID NO: 1386 - DNA, 45 bp, synthetic construct
  source 1..45: mol_type = other DNA
tggattttgaagcttttggatgggattggattatcgctcctaaaa

SEQ ID NO: 1387 - DNA, 45 bp, synthetic construct
  source 1..45: mol_type = other DNA
ttttgaagcttttggatgggattggattatcgctcctaaaagata

SEQ ID NO: 1388 - DNA, 45 bp, synthetic construct
  source 1..45: mol_type = other DNA
agatataaggccaattactgctctggagagtgtgaatttgtattt

SEQ ID NO: 1389 - DNA, 45 bp, synthetic construct
  source 1..45: mol_type = other DNA
aaggccaattactgctctggagagtgtgaatttgtatttttacaa

SEQ ID NO: 1390 - DNA, 45 bp, synthetic construct
  source 1..45: mol_type = other DNA
aggccaattactgctctggagagtgtgaatttgtatttttacaaa

SEQ ID NO: 1391 - DNA, 45 bp, synthetic construct
  source 1..45: mol_type = other DNA
tactcccacaaagatgtctccaattaatatgctatattttaatgg

SEQ ID NO: 1392 - DNA, 45 bp, synthetic construct
  source 1..45: mol_type = other DNA
actcccacaaagatgtctccaattaatatgctatattttaatggc

SEQ ID NO: 1393 - DNA, 45 bp, synthetic construct
  source 1..45: mol_type = other DNA
cccacaaagatgtctccaattaatatgctatattttaatggcaaa

SEQ ID NO: 1394 - DNA, 45 bp, synthetic construct; identical to SEQ ID NO: 1212
  source 1..45: mol_type = other DNA

SEQ ID NO: 1395 - DNA, 45 bp, synthetic construct; identical to SEQ ID NO: 1213
  source 1..45: mol_type = other DNA

SEQ ID NO: 1396 - DNA, 45 bp, synthetic construct; identical to SEQ ID NO: 1214
  source 1..45: mol_type = other DNA

SEQ ID NO: 1397 - DNA, 45 bp, synthetic construct
  source 1..45: mol_type = other DNA
tatgctacagtcacttaagcataagctacagtatgtaaactaaaa

SEQ ID NO: 1398 - DNA, 45 bp, synthetic construct
  source 1..45: mol_type = other DNA
atgtaaactaaaagggggaatatatgcaatggttggcatttaacc

SEQ ID NO: 1399 - DNA, 45 bp, synthetic construct
  source 1..45: mol_type = other DNA
atcatacaagaaagttttatgatttccagagtttttgagctagaa

SEQ ID NO: 1400 - DNA, 45 bp, synthetic construct
  source 1..45: mol_type = other DNA
atgatttccagagtttttgagctagaaggagatcaaattacattt

SEQ ID NO: 1401 - DNA, 45 bp, synthetic construct
  source 1..45: mol_type = other DNA
tgatttccagagtttttgagctagaaggagatcaaattacattta

SEQ ID NO: 1402 - DNA, 45 bp, synthetic construct
  source 1..45: mol_type = other DNA
tttttgagctagaaggagatcaaattacatttatgttcctatata

SEQ ID NO: 1403 - DNA, 45 bp, synthetic construct
  source 1..45: mol_type = other DNA
ttgagctagaaggagatcaaattacatttatgttcctatatatta

SEQ ID NO: 1404 - DNA, 45 bp, synthetic construct
  source 1..45: mol_type = other DNA
gagctagaaggagatcaaattacatttatgttcctatatattaca

SEQ ID NO: 1405 - DNA, 45 bp, synthetic construct
  source 1..45: mol_type = other DNA
gctagaaggagatcaaattacatttatgttcctatatattacaac

SEQ ID NO: 1406 - DNA, 45 bp, synthetic construct
  source 1..45: mol_type = other DNA
aaattacatttatgttcctatatattacaacatcggcgaggaaat

SEQ ID NO: 1407 - DNA, 45 bp, synthetic construct
  source 1..45: mol_type = other DNA
tattacaacatcggcgaggaaatgaaagcgattctccttgagttc

SEQ ID NO: 1408 - DNA, 45 bp, synthetic construct
  source 1..45: mol_type = other DNA
attctccttgagttctgatgaattaaaggagtatgctttaaagtc

SEQ ID NO: 1409 - DNA, 45 bp, synthetic construct
  source 1..45: mol_type = other DNA
tgatgaattaaaggagtatgctttaaagtctatttctttaaagtt

SEQ ID NO: 1410 - DNA, 45 bp, synthetic construct
  source 1..45: mol_type = other DNA
attaaaggagtatgctttaaagtctatttctttaaagttttgttt

SEQ ID NO: 1411 - DNA, 45 bp, synthetic construct
  source 1..45: mol_type = other DNA
ggagtatgctttaaagtctatttctttaaagttttgtttaatatt

SEQ ID NO: 1412 - DNA, 45 bp, synthetic construct
  source 1..45: mol_type = other DNA
ttggtaaaatgcaggattgttatataccatcattcgaatcatcct

SEQ ID NO: 1413 - DNA, 45 bp, synthetic construct; identical to SEQ ID NO: 1412
  source 1..45: mol_type = other DNA

SEQ ID NO: 1414 - DNA, 45 bp, synthetic construct
  source 1..45: mol_type = other DNA
ttatataccatcattcgaatcatccttaaacacttgaatttatat

SEQ ID NO: 1415 - DNA, 45 bp, synthetic construct
  source 1..45: mol_type = other DNA
atcattcgaatcatccttaaacacttgaatttatattgtatggta

SEQ ID NO: 1416 - DNA, 45 bp, synthetic construct
  source 1..45: mol_type = other DNA
attcgaatcatccttaaacacttgaatttatattgtatggtagta

SEQ ID NO: 1417 - DNA, 45 bp, synthetic construct
  source 1..45: mol_type = other DNA
gaatcatccttaaacacttgaatttatattgtatggtagtatact

SEQ ID NO: 1418 - DNA, 45 bp, synthetic construct
  source 1..45: mol_type = other DNA
aaattccacaaaaatagggatggtgcagcatatgcaatttccatt

SEQ ID NO: 1419 - DNA, 45 bp, synthetic construct
  source 1..45: mol_type = other DNA
caaaaatagggatggtgcagcatatgcaatttccattcctattat

SEQ ID NO: 1420 - DNA, 45 bp, synthetic construct
  source 1..45: mol_type = other DNA
ttctgtagcatacttggagaaactgcattatcttaaaaggcagtc

SEQ ID NO: 1421 - DNA, 45 bp, synthetic construct
  source 1..45: mol_type = other DNA
gtcaaaataacatacttggagaagtatgtaattttgtctttggaa

SEQ ID NO: 1422 - DNA, 45 bp, synthetic construct
  source 1..45: mol_type = other DNA
ttggaaaattacaacactgcctttgcaacactgcagtttttatgg

SEQ ID NO: 1423 - DNA, 45 bp, synthetic construct
  source 1..45: mol_type = other DNA
aaattacaacactgcctttgcaacactgcagtttttatggtaaaa

SEQ ID NO: 1424 - DNA, 45 bp, synthetic construct
  source 1..45: mol_type = other DNA
tttttatggtaaaataatagaaatgatcgactctatcaatattgt

SEQ ID NO: 1425 - DNA, 45 bp, synthetic construct
  source 1..45: mol_type = other DNA
ttttatggtaaaataatagaaatgatcgactctatcaatattgta

SEQ ID NO: 1426 - DNA, 45 bp, synthetic construct
  source 1..45: mol_type = other DNA
taaaataatagaaatgatcgactctatcaatattgtataaaaaga

SEQ ID NO: 1427 - DNA, 45 bp, synthetic construct
  source 1..45: mol_type = other DNA
ataatagaaatgatcgactctatcaatattgtataaaaagactga

SEQ ID NO: 1428 - DNA, 45 bp, synthetic construct
  source 1..45: mol_type = other DNA
tatcaatattgtataaaaagactgaaacaatgcatttatataata

SEQ ID NO: 1429 - DNA, 45 bp, synthetic construct
  source 1..45: mol_type = other DNA
atattgtataaaaagactgaaacaatgcatttatataatatgtat

SEQ ID NO: 1430 - DNA, 45 bp, synthetic construct
  source 1..45: mol_type = other DNA
attgtataaaaagactgaaacaatgcatttatataatatgtatac

SEQ ID NO: 1431 - DNA, 45 bp, synthetic construct
  source 1..45: mol_type = other DNA
ttgtataaaaagactgaaacaatgcatttatataatatgtataca

SEQ ID NO: 1432 - DNA, 45 bp, synthetic construct
  source 1..45: mol_type = other DNA
ctgaaacaatgcatttatataatatgtatacaatattgttttgta

SEQ ID NO: 1433 - DNA, 45 bp, synthetic construct
  source 1..45: mol_type = other DNA
aaacaatgcatttatataatatgtatacaatattgttttgtaaat

SEQ ID NO: 1434 - DNA, 45 bp, synthetic construct
  source 1..45: mol_type = other DNA
aatgcatttatataatatgtatacaatattgttttgtaaataagt

SEQ ID NO: 1435 - DNA, 45 bp, synthetic construct
  source 1..45: mol_type = other DNA
atatgtatacaatattgttttgtaaataagtgtctccttttttat

SEQ ID NO: 1436 - DNA, 45 bp, synthetic construct
  source 1..45: mol_type = other DNA
atgtatacaatattgttttgtaaataagtgtctccttttttattt

SEQ ID NO: 1437 - DNA, 45 bp, synthetic construct
  source 1..45: mol_type = other DNA
tgtatacaatattgttttgtaaataagtgtctccttttttattta

SEQ ID NO: 1438 - DNA, 45 bp, synthetic construct
  source 1..45: mol_type = other DNA
gtatacaatattgttttgtaaataagtgtctccttttttatttac

SEQ ID NO: 1439 - DNA, 45 bp, synthetic construct
  source 1..45: mol_type = other DNA
tttactttggtatatttttacactaaggacatttcaaattaagta

SEQ ID NO: 1440 - DNA, 45 bp, synthetic construct
  source 1..45: mol_type = other DNA
tactttggtatatttttacactaaggacatttcaaattaagtact

SEQ ID NO: 1441 - DNA, 45 bp, synthetic construct
  source 1..45: mol_type = other DNA
gtatatttttacactaaggacatttcaaattaagtactaaggcac

SEQ ID NO: 1442 - DNA, 45 bp, synthetic construct
  source 1..45: mol_type = other DNA
tatatttcagagcaaattagcagattaaatagtggtcttaaaact

SEQ ID NO: 1443 - DNA, 45 bp, synthetic construct
  source 1..45: mol_type = other DNA
atatttcagagcaaattagcagattaaatagtggtcttaaaactc

SEQ ID NO: 1444 - DNA, 45 bp, synthetic construct
  source 1..45: mol_type = other DNA
tatttcagagcaaattagcagattaaatagtggtcttaaaactcc

SEQ ID NO: 1445 - DNA, 45 bp, synthetic construct
  source 1..45: mol_type = other DNA
gtcttaaaactccatatgttaatgattagatggttatattacaat

SEQ ID NO: 1446 - DNA, 45 bp, synthetic construct
  source 1..45: mol_type = other DNA
ctccatatgttaatgattagatggttatattacaatcattttata

SEQ ID NO: 1447 - DNA, 45 bp, synthetic construct
  source 1..45: mol_type = other DNA
tatgttaatgattagatggttatattacaatcattttatattttt

SEQ ID NO: 1448 - DNA, 45 bp, synthetic construct
  source 1..45: mol_type = other DNA
aatcattttatatttttttacatgattaacattcacttatggatt

SEQ ID NO: 1449 - DNA, 45 bp, synthetic construct
  source 1..45: mol_type = other DNA
atcattttatatttttttacatgattaacattcacttatggattc

SEQ ID NO: 1450 - DNA, 45 bp, synthetic construct
  source 1..45: mol_type = other DNA
ttatggattcatgatggctgtataaagtgaatttgaaatttcaat

SEQ ID NO: 1451 - DNA, 45 bp, synthetic construct
  source 1..45: mol_type = other DNA
gctgtataaagtgaatttgaaatttcaatggtttactgtcattgt

SEQ ID NO: 1452 - DNA, 45 bp, synthetic construct
  source 1..45: mol_type = other DNA
tgtataaagtgaatttgaaatttcaatggtttactgtcattgtgt

SEQ ID NO: 1453 - DNA, 45 bp, synthetic construct
  source 1..45: mol_type = other DNA
tttcaatggtttactgtcattgtgtttaaatctcaacgttccatt

SEQ ID NO: 1454 - DNA, 45 bp, synthetic construct
  source 1..45: mol_type = other DNA
tggtttactgtcattgtgtttaaatctcaacgttccattatttta

SEQ ID NO: 1455 - DNA, 45 bp, synthetic construct
  source 1..45: mol_type = other DNA
gtttactgtcattgtgtttaaatctcaacgttccattattttaat

SEQ ID NO: 1456 - DNA, 45 bp, synthetic construct
  source 1..45: mol_type = other DNA
ttatctgaaatgaagaataaactgatgctatctcaacaataactg

SEQ ID NO: 1457 - DNA, 45 bp, synthetic construct
  source 1..45: mol_type = other DNA
agaataaactgatgctatctcaacaataactgttacttttatttt

SEQ ID NO: 1458 - DNA, 45 bp, synthetic construct
  source 1..45: mol_type = other DNA
gaataaactgatgctatctcaacaataactgttacttttatttta

SEQ ID NO: 1459 - DNA, 45 bp, synthetic construct
  source 1..45: mol_type = other DNA
aactgttacttttattttataatttgataatgaatatatttctgc

SEQ ID NO: 1460 - DNA, 45 bp, synthetic construct
  source 1..45: mol_type = other DNA
cttttattttataatttgataatgaatatatttctgcatttattt

SEQ ID NO: 1461 - DNA, 45 bp, synthetic construct
  source 1..45: mol_type = other DNA
ttttattttataatttgataatgaatatatttctgcatttattta

SEQ ID NO: 1462 - DNA, 45 bp, synthetic construct
  source 1..45: mol_type = other DNA
tattttataatttgataatgaatatatttctgcatttatttactt

SEQ ID NO: 1463 - DNA, 45 bp, synthetic construct
  source 1..45: mol_type = other DNA
tttgataatgaatatatttctgcatttatttacttctgttttgta

SEQ ID NO: 1464 - DNA, 45 bp, synthetic construct
  source 1..45: mol_type = other DNA
ataatgaatatatttctgcatttatttacttctgttttgtaaatt

SEQ ID NO: 1465 - DNA, 45 bp, synthetic construct
  source 1..45: mol_type = other DNA
ttgtaaattgggattttgttaatcaaatttattgtactatgacta

SEQ ID NO: 1466 - DNA, 45 bp, synthetic construct
  source 1..45: mol_type = other DNA
tcaaatttattgtactatgactaaatgaaattatttcttacatct

SEQ ID NO: 1467 - DNA, 45 bp, synthetic construct
  source 1..45: mol_type = other DNA
caaatttattgtactatgactaaatgaaattatttcttacatcta

SEQ ID NO: 1468 - DNA, 45 bp, synthetic construct
  source 1..45: mol_type = other DNA
tgactaaatgaaattatttcttacatctaatttgtagaaacagta

SEQ ID NO: 1469 - DNA, 45 bp, synthetic construct
  source 1..45: mol_type = other DNA
ctaaatgaaattatttcttacatctaatttgtagaaacagtataa

SEQ ID NO: 1470 - DNA, 45 bp, synthetic construct
  source 1..45: mol_type = other DNA
atttcttacatctaatttgtagaaacagtataagttatattaaag

SEQ ID NO: 1471 - DNA, 45 bp, synthetic construct
  source 1..45: mol_type = other DNA
ttcttacatctaatttgtagaaacagtataagttatattaaagtg

SEQ ID NO: 1472 - DNA, 45 bp, synthetic construct
  source 1..45: mol_type = other DNA
ttacatctaatttgtagaaacagtataagttatattaaagtgttt

SEQ ID NO: 1473 - RNA, 20 nt, synthetic construct
  source 1..20: mol_type = other RNA
tgtgtaatgcatgtacttgg

SEQ ID NO: 1474 - RNA, 20 nt, synthetic construct
  source 1..20: mol_type = other RNA
tcaagaatagaagccattaa

SEQ ID NO: 1475 - RNA, 20 nt, synthetic construct
  source 1..20: mol_type = other RNA
gccattaagatacaaatcct

SEQ ID NO: 1476 - RNA, 20 nt, synthetic construct
  source 1..20: mol_type = other RNA
aacatcagcaaagatgttat

SEQ ID NO: 1477 - RNA, 20 nt, synthetic construct
  source 1..20: mol_type = other RNA
tgttgcttctttaaatttag

SEQ ID NO: 1478 - RNA, 20 nt, synthetic construct
  source 1..20: mol_type = other RNA
tagtaaaggcccaactatgg

SEQ ID NO: 1479 - RNA, 20 nt, synthetic construct
  source 1..20: mol_type = other RNA
cgagactcctacaacagtgt

SEQ ID NO: 1480 - RNA, 20 nt, synthetic construct
  source 1..20: mol_type = other RNA
actcctacaacagtgtttgt

SEQ ID NO: 1481 - RNA, 20 nt, synthetic construct
  source 1..20: mol_type = other RNA
gatgtgaagacagtgttgca

SEQ ID NO: 1482 - RNA, 20 nt, synthetic construct
  source 1..20: mol_type = other RNA
tcaacagaatcacgatgctg

SEQ ID NO: 1483 - RNA, 20 nt, synthetic construct
  source 1..20: mol_type = other RNA
ttggatgggattggattatc

SEQ ID NO: 1484 - RNA, 20 nt, synthetic construct
  source 1..20: mol_type = other RNA
atgggattggattatcgctc

SEQ ID NO: 1485 - RNA, 20 nt, synthetic construct
  source 1..20: mol_type = other RNA
tactgctctggagagtgtga

SEQ ID NO: 1486 - RNA, 20 nt, synthetic construct
  source 1..20: mol_type = other RNA
tctggagagtgtgaatttgt

SEQ ID NO: 1487 - RNA, 20 nt, synthetic construct
  source 1..20: mol_type = other RNA
ctggagagtgtgaatttgta

SEQ ID NO: 1488 - RNA, 20 nt, synthetic construct
  source 1..20: mol_type = other RNA
gtctccaattaatatgctat

SEQ ID NO: 1489 - RNA, 20 nt, synthetic construct
  source 1..20: mol_type = other RNA
tctccaattaatatgctata

SEQ ID NO: 1490 - RNA, 20 nt, synthetic construct
  source 1..20: mol_type = other RNA
ccaattaatatgctatattt

SEQ ID NO: 1491 - RNA, 20 nt, synthetic construct
  source 1..20: mol_type = other RNA
aatggcaaagaacaaataat

SEQ ID NO: 1492 - RNA, 20 nt, synthetic construct
  source 1..20: mol_type = other RNA
atggcaaagaacaaataata

SEQ ID NO: 1493 - RNA, 20 nt, synthetic construct
  source 1..20: mol_type = other RNA
ggcaaagaacaaataatata

SEQ ID NO: 1494 - RNA, 20 nt, synthetic construct
  source 1..20: mol_type = other RNA
taagcataagctacagtatg

SEQ ID NO: 1495 - RNA, 20 nt, synthetic construct
  source 1..20: mol_type = other RNA
gggaatatatgcaatggttg

SEQ ID NO: 1496 - RNA, 20 nt, synthetic construct
  source 1..20: mol_type = other RNA
tttatgatttccagagtttt

SEQ ID NO: 1497 - RNA, 20 nt, synthetic construct
  source 1..20: mol_type = other RNA
tttgagctagaaggagatca

SEQ ID NO: 1498 - RNA, 20 nt, synthetic construct
  source 1..20: mol_type = other RNA
ttgagctagaaggagatcaa

SEQ ID NO: 1499 - RNA, 20 nt, synthetic construct
  source 1..20: mol_type = other RNA
gagatcaaattacatttatg

SEQ ID NO: 1500 - RNA, 20 nt, synthetic construct
  source 1..20: mol_type = other RNA
atcaaattacatttatgttc

SEQ ID NO: 1501 - RNA, 20 nt, synthetic construct
  source 1..20: mol_type = other RNA
caaattacatttatgttcct

SEQ ID NO: 1502 - RNA, 20 nt, synthetic construct
  source 1..20: mol_type = other RNA
aattacatttatgttcctat

SEQ ID NO: 1503 - RNA, 20 nt, synthetic construct
  source 1..20: mol_type = other RNA
tcctatatattacaacatcg

SEQ ID NO: 1504 - RNA, 20 nt, synthetic construct
  source 1..20: mol_type = other RNA
gaggaaatgaaagcgattct

SEQ ID NO: 1505 - RNA, 20 nt, synthetic construct
  source 1..20: mol_type = other RNA
tgatgaattaaaggagtatg

SEQ ID NO: 1506 - RNA, 20 nt, synthetic construct
  source 1..20: mol_type = other RNA
gtatgctttaaagtctattt

SEQ ID NO: 1507 - RNA, 20 nt, synthetic construct
  source 1..20: mol_type = other RNA
tttaaagtctatttctttaa

SEQ ID NO: 1508 - RNA, 20 nt, synthetic construct
  source 1..20: mol_type = other RNA
gtctatttctttaaagtttt

SEQ ID NO: 1509 - RNA, 20 nt, synthetic construct
  source 1..20: mol_type = other RNA
attgttatataccatcattc

SEQ ID NO: 1510 - RNA, 20 nt, synthetic construct
  source 1..20: mol_type = other RNA
attgttatataccatcattc

SEQ ID NO: 1511 - RNA, 20 nt, synthetic construct
  source 1..20: mol_type = other RNA
cgaatcatccttaaacactt

SEQ ID NO: 1512 - RNA, 20 nt, synthetic construct
  source 1..20: mol_type = other RNA
cttaaacacttgaatttata

SEQ ID NO: 1513 - RNA, 20 nt, synthetic construct
  source 1..20: mol_type = other RNA
aaacacttgaatttatattg

SEQ ID NO: 1514 - RNA, 20 nt, synthetic construct
  source 1..20: mol_type = other RNA
acttgaatttatattgtatg

SEQ ID NO: 1515 - RNA, 20 nt, synthetic construct
  source 1..20: mol_type = other RNA
agggatggtgcagcatatgc

SEQ ID NO: 1516 - RNA, 20 nt, synthetic construct
  source 1..20: mol_type = other RNA
tgcagcatatgcaatttcca

SEQ ID NO: 1517 - RNA, 20 nt, synthetic construct
  source 1..20: mol_type = other RNA
ggagaaactgcattatctta

SEQ ID NO: 1518 - RNA, 20 nt, synthetic construct
  source 1..20: mol_type = other RNA
ttggagaagtatgtaatttt

SEQ ID NO: 1519 - RNA, 20 nt, synthetic construct
  source 1..20: mol_type = other RNA
actgcctttgcaacactgca

SEQ ID NO: 1520 - RNA, 20 nt, synthetic construct
  source 1..20: mol_type = other RNA
ctttgcaacactgcagtttt

SEQ ID NO: 1521 - RNA, 20 nt, synthetic construct
  source 1..20: mol_type = other RNA
aatagaaatgatcgactcta

SEQ ID NO: 1522 - RNA, 20 nt, synthetic construct
  source 1..20: mol_type = other RNA
atagaaatgatcgactctat

SEQ ID NO: 1523 - RNA, 20 nt, synthetic construct
  source 1..20: mol_type = other RNA
gatcgactctatcaatattg

SEQ ID NO: 1524 - RNA, 20 nt, synthetic construct
  source 1..20: mol_type = other RNA
gactctatcaatattgtata

SEQ ID NO: 1525 - RNA, 20 nt, synthetic construct
  source 1..20: mol_type = other RNA
aaaagactgaaacaatgcat

SEQ ID NO: 1526 - RNA, 20 nt, synthetic construct
  source 1..20: mol_type = other RNA
actgaaacaatgcatttata

SEQ ID NO: 1527 - RNA, 20 nt, synthetic construct
  source 1..20: mol_type = other RNA
tgaaacaatgcatttatata

SEQ ID NO: 1528 - RNA, 20 nt, synthetic construct
  source 1..20: mol_type = other RNA
gaaacaatgcatttatataa

SEQ ID NO: 1529 - RNA, 20 nt, synthetic construct
  source 1..20: mol_type = other RNA
tatataatatgtatacaata

SEQ ID NO: 1530 - RNA, 20 nt, synthetic construct
  source 1..20: mol_type = other RNA
ataatatgtatacaatattg

SEQ ID NO: 1531 - RNA, 20 nt, synthetic construct
  source 1..20: mol_type = other RNA
tatgtatacaatattgtttt

SEQ ID NO: 1532 - RNA, 20 nt, synthetic construct
  source 1..20: mol_type = other RNA
tgttttgtaaataagtgtct

SEQ ID NO: 1533 - RNA, 20 nt, synthetic construct
  source 1..20: mol_type = other RNA
ttttgtaaataagtgtctcc

SEQ ID NO: 1534 - RNA, 20 nt, synthetic construct
  source 1..20: mol_type = other RNA
tttgtaaataagtgtctcct

SEQ ID NO: 1535 - RNA, 20 nt, synthetic construct
  source 1..20: mol_type = other RNA
ttgtaaataagtgtctcctt

SEQ ID NO: 1536 - RNA, 20 nt, synthetic construct
  source 1..20: mol_type = other RNA
ttttacactaaggacatttc

SEQ ID NO: 1537 - RNA, 20 nt, synthetic construct
  source 1..20: mol_type = other RNA
ttacactaaggacatttcaa

SEQ ID NO: 1538 - RNA, 20 nt, synthetic construct
  source 1..20: mol_type = other RNA
aaggacatttcaaattaagt

SEQ ID NO: 1539 - RNA, 20 nt, synthetic construct
  source 1..20: mol_type = other RNA
attagcagattaaatagtgg

SEQ ID NO: 1540 - RNA, 20 nt, synthetic construct
  source 1..20: mol_type = other RNA
ttagcagattaaatagtggt

SEQ ID NO: 1541 - RNA, 20 nt, synthetic construct
  source 1..20: mol_type = other RNA
tagcagattaaatagtggtc

SEQ ID NO: 1542 - RNA, 20 nt, synthetic construct
  source 1..20: mol_type = other RNA
atgttaatgattagatggtt

SEQ ID NO: 1543 - RNA, 20 nt, synthetic construct
  source 1..20: mol_type = other RNA
attagatggttatattacaa

SEQ ID NO: 1544 - RNA, 20 nt, synthetic construct
  source 1..20: mol_type = other RNA
atggttatattacaatcatt

SEQ ID NO: 1545 - RNA, 20 nt, synthetic construct
  source 1..20: mol_type = other RNA
ttttacatgattaacattca

SEQ ID NO: 1546 - RNA, 20 nt, synthetic construct
  source 1..20: mol_type = other RNA
tttacatgattaacattcac

SEQ ID NO: 1547 - RNA, 20 nt, synthetic construct
  source 1..20: mol_type = other RNA
ggctgtataaagtgaatttg

SEQ ID NO: 1548 - RNA, 20 nt, synthetic construct
  source 1..20: mol_type = other RNA
tttgaaatttcaatggttta

SEQ ID NO: 1549 - RNA, 20 nt, synthetic construct
  source 1..20: mol_type = other RNA
tgaaatttcaatggtttact

SEQ ID NO: 1550 - RNA, 20 nt, synthetic construct
  source 1..20: mol_type = other RNA
gtcattgtgtttaaatctca

SEQ ID NO: 1551 - RNA, 20 nt, synthetic construct
  source 1..20: mol_type = other RNA
gtgtttaaatctcaacgttc

SEQ ID NO: 1552 - RNA, 20 nt, synthetic construct
  source 1..20: mol_type = other RNA
gtttaaatctcaacgttcca

SEQ ID NO: 1553 - RNA, 20 nt, synthetic construct
  source 1..20: mol_type = other RNA
aataaactgatgctatctca

SEQ ID NO: 1554 - RNA, 20 nt, synthetic construct
  source 1..20: mol_type = other RNA
tatctcaacaataactgtta

SEQ ID NO: 1555 - RNA, 20 nt, synthetic construct
  source 1..20: mol_type = other RNA
atctcaacaataactgttac

SEQ ID NO: 1556 - RNA, 20 nt, synthetic construct
  source 1..20: mol_type = other RNA
tttataatttgataatgaat

SEQ ID NO: 1557 - RNA, 20 nt, synthetic construct
  source 1..20: mol_type = other RNA
ttgataatgaatatatttct

SEQ ID NO: 1558 - RNA, 20 nt, synthetic construct
  source 1..20: mol_type = other RNA
tgataatgaatatatttctg

SEQ ID NO: 1559 - RNA, 20 nt, synthetic construct
  source 1..20: mol_type = other RNA
taatgaatatatttctgcat

SEQ ID NO: 1560 - RNA, 20 nt, synthetic construct
  source 1..20: mol_type = other RNA
atttctgcatttatttactt

SEQ ID NO: 1561 - RNA, 20 nt, synthetic construct
  source 1..20: mol_type = other RNA
ctgcatttatttacttctgt

SEQ ID NO: 1562 - RNA, 20 nt, synthetic construct
  source 1..20: mol_type = other RNA
ttgttaatcaaatttattgt

SEQ ID NO: 1563 - RNA, 20 nt, synthetic construct
  source 1..20: mol_type = other RNA
tatgactaaatgaaattatt

SEQ ID NO: 1564 - RNA, 20 nt, synthetic construct
  source 1..20: mol_type = other RNA
atgactaaatgaaattattt

SEQ ID NO: 1565 - RNA, 20 nt, synthetic construct
  source 1..20: mol_type = other RNA
atttcttacatctaatttgt

SEQ ID NO: 1566 - RNA, 20 nt, synthetic construct
  source 1..20: mol_type = other RNA
tcttacatctaatttgtaga

SEQ ID NO: 1567 - RNA, 20 nt, synthetic construct
  source 1..20: mol_type = other RNA
tttgtagaaacagtataagt

SEQ ID NO: 1568 - RNA, 20 nt, synthetic construct
  source 1..20: mol_type = other RNA
tgtagaaacagtataagtta

SEQ ID NO: 1569 - RNA, 20 nt, synthetic construct
  source 1..20: mol_type = other RNA
agaaacagtataagttatat

SEQ ID NO: 1570 - RNA, 21 nt, synthetic construct
  source 1..21: mol_type = other RNA
tcttgttcttatttcttcttt

SEQ ID NO: 1571 - RNA, 21 nt, synthetic construct
  source 1..21: mol_type = other RNA
tcacgcacatgcattacactt

SEQ ID NO: 1572 - RNA, 21 nt, synthetic construct
  source 1..21: mol_type = other RNA
ttggcttctattctggagttt

SEQ ID NO: 1573 - RNA, 21 nt, synthetic construct
  source 1..21: mol_type = other RNA
taacatttgggcttgccattt

SEQ ID NO: 1574 - RNA, 21 nt, synthetic construct
  source 1..21: mol_type = other RNA
tcaacatttgggcttgccatt

SEQ ID NO: 1575 - RNA, 21 nt, synthetic construct
  source 1..21: mol_type = other RNA
tcactgttgtaggagtctttt

SEQ ID NO: 1576 - RNA, 21 nt, synthetic construct
  source 1..21: mol_type = other RNA
ttaagttggattcaggctgtt

SEQ ID NO: 1577 - RNA, 21 nt, synthetic construct
  source 1..21: mol_type = other RNA
tataatccagtcccatccatt

SEQ ID NO: 1578 - RNA, 21 nt, synthetic construct
  source 1..21: mol_type = other RNA
tcacactctcctgagcagttt

SEQ ID NO: 1579 - RNA, 21 nt, synthetic construct
  source 1..21: mol_type = other RNA
tcaaattcacactctcctgtt

SEQ ID NO: 1580 - RNA, 21 nt, synthetic construct
  source 1..21: mol_type = other RNA
tacaaattcacactctccttt

SEQ ID NO: 1581 - RNA, 21 nt, synthetic construct
  source 1..21: mol_type = other RNA
taatatagcatattaatggtt

SEQ ID NO: 1582 - RNA, 21 nt, synthetic construct
  source 1..21: mol_type = other RNA
tttatttgttctttgccattt

SEQ ID NO: 1583 - RNA, 21 nt, synthetic construct
  source 1..21: mol_type = other RNA
tattatttgttctttgccatt

SEQ ID NO: 1584 - RNA, 20 nt, synthetic construct
  source 1..20: mol_type = other RNA
ttattatttgttctttgcct

SEQ ID NO: 1585 - RNA, 21 nt, synthetic construct
  source 1..21: mol_type = other RNA
taaatttctaacctaatgctt

SEQ ID NO: 1586 - RNA, 21 nt, synthetic construct
  source 1..21: mol_type = other RNA
ttacagcctgtggtgcttgtt

SEQ ID NO: 1587 - RNA, 21 nt, synthetic construct
  source 1..21: mol_type = other RNA
tatacactgtagcttgtgctt

SEQ ID NO: 1588 - RNA, 21 nt, synthetic construct
  source 1..21: mol_type = other RNA
tttggtggttgaatgccaatt

SEQ ID NO: 1589 - RNA, 21 nt, synthetic construct
  source 1..21: mol_type = other RNA
tgaaatcatacaacatccttt

SEQ ID NO: 1590 - RNA, 21 nt, synthetic construct
  source 1..21: mol_type = other RNA
tctctggaaatcatacaactt

SEQ ID NO: 1591 - RNA, 21 nt, synthetic construct
  source 1..21: mol_type = other RNA
taatgtaatttgatctccatt

SEQ ID NO: 1592 - RNA, 21 nt, synthetic construct
  source 1..21: mol_type = other RNA
tcataaatgtaatttgatctt

SEQ ID NO: 1593 - RNA, 21 nt, synthetic construct
  source 1..21: mol_type = other RNA
tactgttaggaaataagactt

SEQ ID NO: 1594 - RNA, 21 nt, synthetic construct
  source 1..21: mol_type = other RNA
taaactgttaggaaataagtt

SEQ ID NO: 1595 - RNA, 21 nt, synthetic construct
  source 1..21: mol_type = other RNA
tgaaactgttaggaaataatt

SEQ ID NO: 1596 - RNA, 21 nt, synthetic construct
  source 1..21: mol_type = other RNA
tacatatagattcttccgttt

SEQ ID NO: 1597 - RNA, 21 nt, synthetic construct
  source 1..21: mol_type = other RNA
ttacatatagattcttccgtt

SEQ ID NO: 1598 - RNA, 21 nt, synthetic construct
  source 1..21: mol_type = other RNA
tgctacatatagattcttctt

SEQ ID NO: 1599 - RNA, 21 nt, synthetic construct
  source 1..21: mol_type = other RNA
tacaatcctacactttacatt

SEQ ID NO: 1600 - RNA, 21 nt, synthetic construct
  source 1..21: mol_type = other RNA
taacaatcctacactttactt

SEQ ID NO: 1601 - RNA, 21 nt, synthetic construct
  source 1..21: mol_type = other RNA
tacaaatataagtgtacattt

SEQ ID NO: 1602 - RNA, 21 nt, synthetic construct
  source 1..21: mol_type = other RNA
tacaatacaaatataagtgtt

SEQ ID NO: 1603 - RNA, 21 nt, synthetic construct
  source 1..21: mol_type = other RNA
tccaagtatacaatacaaatt

SEQ ID NO: 1604 - RNA, 21 nt, synthetic construct
  source 1..21: mol_type = other RNA
taccaagtatacaatacaatt

SEQ ID NO: 1605 - RNA, 21 nt, synthetic construct
  source 1..21: mol_type = other RNA
tccattcctactttgtggatt

SEQ ID NO: 1606 - RNA, 21 nt, synthetic construct
  source 1..21: mol_type = other RNA
taagattcttctttccttatt

SEQ ID NO: 1607 - RNA, 21 nt, synthetic construct
  source 1..21: mol_type = other RNA
taatactgtttggctgccttt

SEQ ID NO: 1608 - RNA, 21 nt, synthetic construct
  source 1..21: mol_type = other RNA
tgccatgtgataaaggcagtt

SEQ ID NO: 1609 - RNA, 21 nt, synthetic construct
  source 1..21: mol_type = other RNA
ttagaaccagtcatttccatt

SEQ ID NO: 1610 - RNA, 21 nt, synthetic construct
  source 1..21: mol_type = other RNA
tgtaattgtttcagagtcttt

SEQ ID NO: 1611 - RNA, 21 nt, synthetic construct
  source 1..21: mol_type = other RNA
ttaaatgtaattgtttcagtt

SEQ ID NO: 1612 - RNA, 21 nt, synthetic construct
  source 1..21: mol_type = other RNA
tataaatgtaattgtttcatt

SEQ ID NO: 1613 - RNA, 21 nt, synthetic construct
  source 1..21: mol_type = other RNA
ttataaatgtaattgtttctt

SEQ ID NO: 1614 - RNA, 21 nt, synthetic construct
  source 1..21: mol_type = other RNA
tatacatattatataaatgtt

SEQ ID NO: 1615 - RNA, 21 nt, synthetic construct
  source 1..21: mol_type = other RNA
taatattgtatacatattatt

SEQ ID NO: 1616 - RNA, 21 nt, synthetic construct
  source 1..21: mol_type = other RNA
tcaatattgtatacatatttt

SEQ ID NO: 1617 - RNA, 21 nt, synthetic construct
  source 1..21: mol_type = other RNA
taaacaatattgtatacattt

SEQ ID NO: 1618 - RNA, 21 nt, synthetic construct
  source 1..21: mol_type = other RNA
tgacacttatttacaaaactt

SEQ ID NO: 1619 - RNA, 21 nt, synthetic construct
  source 1..21: mol_type = other RNA
tgagacacttatttacaaatt

SEQ ID NO: 1620 - RNA, 21 nt, synthetic construct
  source 1..21: mol_type = other RNA
tggagacacttatttacaatt

SEQ ID NO: 1621 - RNA, 21 nt, synthetic construct
  source 1..21: mol_type = other RNA
taggagacacttatttacatt

SEQ ID NO: 1622 - RNA, 21 nt, synthetic construct
  source 1..21: mol_type = other RNA
taaaggagacacttatttatt

SEQ ID NO: 1623 - RNA, 21 nt, synthetic construct
  source 1..21: mol_type = other RNA
taaatttcattagtgtaaatt

SEQ ID NO: 1624 - RNA, 21 nt, synthetic construct
  source 1..21: mol_type = other RNA
tgaaatttcattagtgtaatt

SEQ ID NO: 1625 - RNA, 21 nt, synthetic construct
  source 1..21: mol_type = other RNA
ttgaaatttcattagtgtatt

SEQ ID NO: 1626 - RNA, 21 nt, synthetic construct
  source 1..21: mol_type = other RNA
taatgatttgaaatttcattt

SEQ ID NO: 1627 - RNA, 21 nt, synthetic construct
  source 1..21: mol_type = other RNA
ttttgtactttaatgattttt

SEQ ID NO: 1628 - RNA, 21 nt, synthetic construct
  source 1..21: mol_type = other RNA
tcactattgaatctgctaatt

SEQ ID NO: 1629 - RNA, 21 nt, synthetic construct
  source 1..21: mol_type = other RNA
taccactattgaatctgcttt

SEQ ID NO: 1630 - RNA, 21 nt, synthetic construct
  source 1..21: mol_type = other RNA
taccttctaatcttaacattt

SEQ ID NO: 1631 - RNA, 21 nt, synthetic construct
  source 1..21: mol_type = other RNA
tataaccttctaatcttaatt

SEQ ID NO: 1632 - RNA, 21 nt, synthetic construct
  source 1..21: mol_type = other RNA
tatataaccttctaatctttt

SEQ ID NO: 1633 - RNA, 21 nt, synthetic construct
  source 1..21: mol_type = other RNA
tttgattgtaatataaccttt

SEQ ID NO: 1634 - RNA, 21 nt, synthetic construct
  source 1..21: mol_type = other RNA
taattgattgtaatataactt

SEQ ID NO: 1635 - RNA, 21 nt, synthetic construct
  source 1..21: mol_type = other RNA
ttaaattgattgtaatatatt

SEQ ID NO: 1636 - RNA, 21 nt, synthetic construct
  source 1..21: mol_type = other RNA
tacataaattgattgtaattt

SEQ ID NO: 1637 - RNA, 21 nt, synthetic construct
  source 1..21: mol_type = other RNA
ttacataaattgattgtaatt

SEQ ID NO: 1638 - RNA, 21 nt, synthetic construct
  source 1..21: mol_type = other RNA
ttgaatgttgataatgtaatt

SEQ ID NO: 1639 - RNA, 21 nt, synthetic construct
  source 1..21: mol_type = other RNA
tcatgttggtatgtttagttt

SEQ ID NO: 1640 - RNA, 21 nt, synthetic construct
  source 1..21: mol_type = other RNA
ttacatgttggtatgtttatt

SEQ ID NO: 1641 - RNA, 21 nt, synthetic construct
  source 1..21: mol_type = other RNA
ttctttagatacatgttggtt

SEQ ID NO: 1642 - RNA, 21 nt, synthetic construct
  source 1..21: mol_type = other RNA
tgagataccatatttgtattt

SEQ ID NO: 1643 - RNA, 21 nt, synthetic construct
  source 1..21: mol_type = other RNA
tctgttattgagataccattt

SEQ ID NO: 1644 - RNA, 21 nt, synthetic construct
  source 1..21: mol_type = other RNA
tagtagctgttattgagattt

SEQ ID NO: 1645 - RNA, 21 nt, synthetic construct
  source 1..21: mol_type = other RNA
taagtagctgttattgagatt

SEQ ID NO: 1646 - RNA, 21 nt, synthetic construct
  source 1..21: mol_type = other RNA
taaagtagctgttattgagtt

SEQ ID NO: 1647 - RNA, 21 nt, synthetic construct
  source 1..21: mol_type = other RNA
tttcattgtcaaattataatt

SEQ ID NO: 1648 - RNA, 21 nt, synthetic construct
  source 1..21: mol_type = other RNA
taaatgtattcattgtcaatt

SEQ ID NO: 1649 - RNA, 21 nt, synthetic construct
  source 1..21: mol_type = other RNA
tgaaatgtattcattgtcatt

SEQ ID NO: 1650 - RNA, 21 nt, synthetic construct
  source 1..21: mol_type = other RNA
tagaaatgtattcattgtctt

SEQ ID NO: 1651 - RNA, 21 nt, synthetic construct
  source 1..21: mol_type = other RNA
taaagttccaatttataaatt

SEQ ID NO: 1652 - RNA, 21 nt, synthetic construct
  source 1..21: mol_type = other RNA
tcaaagttccaatttataatt

SEQ ID NO: 1653 - RNA, 21 nt, synthetic construct
  source 1..21: mol_type = other RNA
tacaaagttccaatttatatt

SEQ ID NO: 1654 - RNA, 21 nt, synthetic construct
  source 1..21: mol_type = other RNA
ttttgataaacaaagttcctt

SEQ ID NO: 1655 - RNA, 21 nt, synthetic construct
  source 1..21: mol_type = other RNA
tttcatttagctatgagtatt

SEQ ID NO: 1656 - RNA, 21 nt, synthetic construct
  source 1..21: mol_type = other RNA
taataatttcatttagctatt

SEQ ID NO: 1657 - RNA, 21 nt, synthetic construct
  source 1..21: mol_type = other RNA
tgaaataatttcatttagctt

SEQ ID NO: 1658 - RNA, 16 nt, synthetic construct
  source 1..16: mol_type = other RNA
agaaataagaacaaga

SEQ ID NO: 1659 - RNA, 16 nt, synthetic construct
  source 1..16: mol_type = other RNA
taatgcatgtgcgtga

SEQ ID NO: 1660 - RNA, 16 nt, synthetic construct
  source 1..16: mol_type = other RNA
ccagaatagaagccaa

SEQ ID NO: 1661 - RNA, 16 nt, synthetic construct
  source 1..16: mol_type = other RNA
gcaagcccaaatgtta

SEQ ID NO: 1662 - RNA, 16 nt, synthetic construct
  source 1..16: mol_type = other RNA
caagcccaaatgttga

SEQ ID NO: 1663 - RNA, 16 nt, synthetic construct
  source 1..16: mol_type = other RNA
actcctacaacagtga

SEQ ID NO: 1664 - RNA, 16 nt, synthetic construct
  source 1..16: mol_type = other RNA
cctgaatccaacttaa

SEQ ID NO: 1665 - RNA, 16 nt, synthetic construct
  source 1..16: mol_type = other RNA
atgggactggattata

SEQ ID NO: 1666 - RNA, 16 nt, synthetic construct
  source 1..16: mol_type = other RNA
gctcaggagagtgtga

SEQ ID NO: 1667 - RNA, 16 nt, synthetic construct
  source 1..16: mol_type = other RNA
gagagtgtgaatttga

SEQ ID NO: 1668 - RNA, 16 nt, synthetic construct
  source 1..16: mol_type = other RNA
agagtgtgaatttgta

SEQ ID NO: 1669 - RNA, 16 nt, synthetic construct
  source 1..16: mol_type = other RNA
ttaatatgctatatta

SEQ ID NO: 1670 - RNA, 16 nt, synthetic construct
  source 1..16: mol_type = other RNA
gcaaagaacaaataaa

SEQ ID NO: 1671 - RNA, 16 nt, synthetic construct
  source 1..16: mol_type = other RNA
caaagaacaaataata

SEQ ID NO: 1672 - RNA, 15 nt, synthetic construct
  source 1..15: mol_type = other RNA
aagaacaaataataa

SEQ ID NO: 1673 - RNA, 16 nt, synthetic construct
  source 1..16: mol_type = other RNA
ttaggttagaaattta

SEQ ID NO: 1674 - RNA, 16 nt, synthetic construct
  source 1..16: mol_type = other RNA
gcaccacaggctgtaa

SEQ ID NO: 1675 - RNA, 16 nt, synthetic construct
  source 1..16: mol_type = other RNA
caagctacagtgtata

SEQ ID NO: 1676 - RNA, 16 nt, synthetic construct
  source 1..16: mol_type = other RNA
gcattcaaccaccaaa

SEQ ID NO: 1677 - RNA, 16 nt, synthetic construct
  source 1..16: mol_type = other RNA
atgttgtatgatttca

SEQ ID NO: 1678 - RNA, 16 nt, synthetic construct
  source 1..16: mol_type = other RNA
gtatgatttccagaga

SEQ ID NO: 1679 - RNA, 16 nt, synthetic construct
  source 1..16: mol_type = other RNA
agatcaaattacatta

SEQ ID NO: 1680 - RNA, 16 nt, synthetic construct
  source 1..16: mol_type = other RNA
caaattacatttatga

SEQ ID NO: 1681 - RNA, 16 nt, synthetic construct
  source 1..16: mol_type = other RNA
ttatttcctaacagta

SEQ ID NO: 1682 - RNA, 16 nt, synthetic construct
  source 1..16: mol_type = other RNA
atttcctaacagttta

SEQ ID NO: 1683 - RNA, 16 nt, synthetic construct
  source 1..16: mol_type = other RNA
tttcctaacagtttca

SEQ ID NO: 1684 - RNA, 16 nt, synthetic construct
  source 1..16: mol_type = other RNA
gaagaatctatatgta

SEQ ID NO: 1685 - RNA, 16 nt, synthetic construct
  source 1..16: mol_type = other RNA
aagaatctatatgtaa

SEQ ID NO: 1686 - RNA, 16 nt, synthetic construct
  source 1..16: mol_type = other RNA
gaatctatatgtagca

SEQ ID NO: 1687 - RNA, 16 nt, synthetic construct
  source 1..16: mol_type = other RNA
aaagtgtaggattgta

SEQ ID NO: 1688 - RNA, 16 nt, synthetic construct
  source 1..16: mol_type = other RNA
aagtgtaggattgtta

SEQ ID NO: 1689 - RNA, 16 nt, synthetic construct
  source 1..16: mol_type = other RNA
tacacttatatttgta

SEQ ID NO: 1690 - RNA, 16 nt, synthetic construct
  source 1..16: mol_type = other RNA
ttatatttgtattgta

SEQ ID NO: 1691 - RNA, 16 nt, synthetic construct
  source 1..16: mol_type = other RNA
gtattgtatacttgga

SEQ ID NO: 1692 - RNA, 16 nt, synthetic construct
  source 1..16: mol_type = other RNA
tattgtatacttggta

SEQ ID NO: 1693 - RNA, 16 nt, synthetic construct
  source 1..16: mol_type = other RNA
acaaagtaggaatgga

SEQ ID NO: 1694 - RNA, 16 nt, synthetic construct
  source 1..16: mol_type = other RNA
ggaaagaagaatctta

SEQ ID NO: 1695 - RNA, 16 nt, synthetic construct
  source 1..16: mol_type = other RNA
cagccaaacagtatta

SEQ ID NO: 1696 - RNA, 16 nt, synthetic construct
  source 1..16: mol_type = other RNA
cctttatcacatggca

SEQ ID NO: 1697 - RNA, 16 nt, synthetic construct
  source 1..16: mol_type = other RNA
aaatgactggttctaa

SEQ ID NO: 1698 - RNA, 16 nt, synthetic construct
  source 1..16: mol_type = other RNA
ctctgaaacaattaca

SEQ ID NO: 1699 - RNA, 16 nt, synthetic construct
  source 1..16: mol_type = other RNA
aaacaattacatttaa

SEQ ID NO: 1700 - RNA, 16 nt, synthetic construct
  source 1..16: mol_type = other RNA
aacaattacatttata

SEQ ID NO: 1701 - RNA, 16 nt, synthetic construct
  source 1..16: mol_type = other RNA
acaattacatttataa

SEQ ID NO: 1702 - RNA, 16 nt, synthetic construct
  source 1..16: mol_type = other RNA
ttatataatatgtata

SEQ ID NO: 1703 - RNA, 16 nt, synthetic construct
  source 1..16: mol_type = other RNA
tatgtatacaatatta

SEQ ID NO: 1704 - RNA, 16 nt, synthetic construct
  source 1..16: mol_type = other RNA
atgtatacaatattga

SEQ ID NO: 1705 - RNA, 16 nt, synthetic construct
  source 1..16: mol_type = other RNA
tatacaatattgttta

SEQ ID NO: 1706 - RNA, 16 nt, synthetic construct
  source 1..16: mol_type = other RNA
ttgtaaataagtgtca

SEQ ID NO: 1707 - RNA, 16 nt, synthetic construct
  source 1..16: mol_type = other RNA
gtaaataagtgtctca

SEQ ID NO: 1708 - RNA, 16 nt, synthetic construct
  source 1..16: mol_type = other RNA
taaataagtgtctcca

SEQ ID NO: 1709 - RNA, 16 nt, synthetic construct
  source 1..16: mol_type = other RNA
aaataagtgtctccta

SEQ ID NO: 1710 - RNA, 16 nt, synthetic construct
  source 1..16: mol_type = other RNA
ataagtgtctccttta

SEQ ID NO: 1711 - RNA, 16 nt, synthetic construct
  source 1..16: mol_type = other RNA
acactaatgaaattta

SEQ ID NO: 1712 - RNA, 16 nt, synthetic construct
  source 1..16: mol_type = other RNA
cactaatgaaatttca

SEQ ID NO: 1713 - RNA, 16 nt, synthetic construct
  source 1..16: mol_type = other RNA
actaatgaaatttcaa

SEQ ID NO: 1714 - RNA, 16 nt, synthetic construct
  source 1..16: mol_type = other RNA
aaatttcaaatcatta

SEQ ID NO: 1715 - RNA, 16 nt, synthetic construct
  source 1..16: mol_type = other RNA
tcattaaagtacaaaa

SEQ ID NO: 1716 - RNA, 16 nt, synthetic construct
  source 1..16: mol_type = other RNA
gcagattcaatagtga

SEQ ID NO: 1717 - RNA, 16 nt, synthetic construct
  source 1..16: mol_type = other RNA
agattcaatagtggta

SEQ ID NO: 1718 - RNA, 16 nt, synthetic construct
  source 1..16: mol_type = other RNA
ttaagattagaaggta

SEQ ID NO: 1719 - RNA, 16 nt, synthetic construct
  source 1..16: mol_type = other RNA
agattagaaggttata

SEQ ID NO: 1720 - RNA, 16 nt, synthetic construct
  source 1..16: mol_type = other RNA
attagaaggttatata

SEQ ID NO: 1721 - RNA, 16 nt, synthetic construct
  source 1..16: mol_type = other RNA
ttatattacaatcaaa

SEQ ID NO: 1722 - RNA, 16 nt, synthetic construct
  source 1..16: mol_type = other RNA
atattacaatcaatta

SEQ ID NO: 1723 - RNA, 16 nt, synthetic construct
  source 1..16: mol_type = other RNA
attacaatcaatttaa

SEQ ID NO: 1724 - RNA, 16 nt, synthetic construct
  source 1..16: mol_type = other RNA
acaatcaatttatgta

SEQ ID NO: 1725 - RNA, 16 nt, synthetic construct
  source 1..16: mol_type = other RNA
caatcaatttatgtaa

SEQ ID NO: 1726 - RNA, 16 nt, synthetic construct
  source 1..16: mol_type = other RNA
cattatcaacattcaa

SEQ ID NO: 1727 - RNA, 16 nt, synthetic construct
  source 1..16: mol_type = other RNA
aaacataccaacatga

SEQ ID NO: 1728 - RNA, 16 nt, synthetic construct
  source 1..16: mol_type = other RNA
acataccaacatgtaa

SEQ ID NO: 1729 - RNA, 16 nt, synthetic construct
  source 1..16: mol_type = other RNA
acatgtatctaaagaa

SEQ ID NO: 1730 - RNA, 16 nt, synthetic construct
  source 1..16: mol_type = other RNA
caaatatggtatctca

SEQ ID NO: 1731 - RNA, 16 nt, synthetic construct
  source 1..16: mol_type = other RNA
gtatctcaataacaga

SEQ ID NO: 1732 - RNA, 16 nt, synthetic construct
  source 1..16: mol_type = other RNA
tcaataacagctacta

SEQ ID NO: 1733 - RNA, 16 nt, synthetic construct
  source 1..16: mol_type = other RNA
caataacagctactta

SEQ ID NO: 1734 - RNA, 16 nt, synthetic construct
  source 1..16: mol_type = other RNA
aataacagctacttta

SEQ ID NO: 1735 - RNA, 16 nt, synthetic construct
  source 1..16: mol_type = other RNA
taatttgacaatgaaa

SEQ ID NO: 1736 - RNA, 16 nt, synthetic construct
  source 1..16: mol_type = other RNA
acaatgaatacattta

SEQ ID NO: 1737 - RNA, 16 nt, synthetic construct
  source 1..16: mol_type = other RNA
caatgaatacatttca

SEQ ID NO: 1738 - RNA, 16 nt, synthetic construct
  source 1..16: mol_type = other RNA
aatgaatacatttcta

SEQ ID NO: 1739 - RNA, 16 nt, synthetic construct
  source 1..16: mol_type = other RNA
ataaattggaacttta

SEQ ID NO: 1740 - RNA, 16 nt, synthetic construct
  source 1..16: mol_type = other RNA
taaattggaactttga

SEQ ID NO: 1741 - RNA, 16 nt, synthetic construct
  source 1..16: mol_type = other RNA
aaattggaactttgta

SEQ ID NO: 1742 - RNA, 16 nt, synthetic construct
  source 1..16: mol_type = other RNA
actttgtttatcaaaa

SEQ ID NO: 1743 - RNA, 16 nt, synthetic construct
  source 1..16: mol_type = other RNA
tcatagctaaatgaaa

SEQ ID NO: 1744 - RNA, 16 nt, synthetic construct
  source 1..16: mol_type = other RNA
ctaaatgaaattatta

SEQ ID NO: 1745 - RNA, 16 nt, synthetic construct
  source 1..16: mol_type = other RNA
aaatgaaattatttca

SEQ ID NO: 1746 - RNA, 21 nt, synthetic construct
  source 1..21: mol_type = other RNA
tcaagtacatgcattacactt

SEQ ID NO: 1747 - RNA, 21 nt, synthetic construct
  source 1..21: mol_type = other RNA
ttaatggcttctattcttgtt

SEQ ID NO: 1748 - RNA, 21 nt, synthetic construct
  source 1..21: mol_type = other RNA
tggatttgtatcttaatggtt

SEQ ID NO: 1749 - RNA, 21 nt, synthetic construct
  source 1..21: mol_type = other RNA
ttaacatctttgctgatgttt

SEQ ID NO: 1750 - RNA, 21 nt, synthetic construct
  source 1..21: mol_type = other RNA
ttaaatttaaagaagcaactt

SEQ ID NO: 1751 - RNA, 21 nt, synthetic construct
  source 1..21: mol_type = other RNA
tcatagttgggcctttacttt

SEQ ID NO: 1752 - RNA, 21 nt, synthetic construct
  source 1..21: mol_type = other RNA
tcactgttgtaggagtctctt

SEQ ID NO: 1753 - RNA, 21 nt, synthetic construct
  source 1..21: mol_type = other RNA
tcaaacactgttgtaggagtt

SEQ ID NO: 1754 - RNA, 21 nt, synthetic construct
  source 1..21: mol_type = other RNA
tgcaacactgtcttcacattt

SEQ ID NO: 1755 - RNA, 21 nt, synthetic construct
  source 1..21: mol_type = other RNA
tagcatcgtgattctgttgtt

SEQ ID NO: 1756 - RNA, 21 nt, synthetic construct
  source 1..21: mol_type = other RNA
tataatccaatcccatccatt

SEQ ID NO: 1757 - RNA, 21 nt, synthetic construct
  source 1..21: mol_type = other RNA
tagcgataatccaatcccatt

SEQ ID NO: 1758 - RNA, 21 nt, synthetic construct
  source 1..21: mol_type = other RNA
tcacactctccagagcagttt

SEQ ID NO: 1759 - RNA, 21 nt, synthetic construct
  source 1..21: mol_type = other RNA
tcaaattcacactctccagtt

SEQ ID NO: 1760 - RNA, 21 nt, synthetic construct
  source 1..21: mol_type = other RNA
tacaaattcacactctccatt

SEQ ID NO: 1761 - RNA, 21 nt, synthetic construct
  source 1..21: mol_type = other RNA
ttagcatattaattggagatt

SEQ ID NO: 1762 - RNA, 21 nt, synthetic construct
  source 1..21: mol_type = other RNA
tatagcatattaattggagtt

SEQ ID NO: 1763 - RNA, 21 nt, synthetic construct
  source 1..21: mol_type = other RNA
taatatagcatattaattgtt

SEQ ID NO: 1764 - RNA, 21 nt, synthetic construct
  source 1..21: mol_type = other RNA
tttatttgttctttgccattt

SEQ ID NO: 1765 - RNA, 21 nt, synthetic construct
  source 1..21: mol_type = other RNA
tattatttgttctttgccatt

SEQ ID NO: 1766 - RNA, 20 nt, synthetic construct
  source 1..20: mol_type = other RNA
ttattatttgttctttgcct

SEQ ID NO: 1767 - RNA, 21 nt, synthetic construct
  source 1..21: mol_type = other RNA
tatactgtagcttatgctttt

SEQ ID NO: 1768 - RNA, 21 nt, synthetic construct
  source 1..21: mol_type = other RNA
taaccattgcatatattcctt

SEQ ID NO: 1769 - RNA, 21 nt, synthetic construct
  source 1..21: mol_type = other RNA
taaactctggaaatcataatt

SEQ ID NO: 1770 - RNA, 21 nt, synthetic construct
  source 1..21: mol_type = other RNA
tgatctccttctagctcaatt

SEQ ID NO: 1771 - RNA, 21 nt, synthetic construct
  source 1..21: mol_type = other RNA
ttgatctccttctagctcatt

SEQ ID NO: 1772 - RNA, 21 nt, synthetic construct
  source 1..21: mol_type = other RNA
tataaatgtaatttgatcttt

SEQ ID NO: 1773 - RNA, 21 nt, synthetic construct
  source 1..21: mol_type = other RNA
taacataaatgtaatttgatt

SEQ ID NO: 1774 - RNA, 21 nt, synthetic construct
  source 1..21: mol_type = other RNA
tggaacataaatgtaattttt

SEQ ID NO: 1775 - RNA, 21 nt, synthetic construct
  source 1..21: mol_type = other RNA
ttaggaacataaatgtaattt

SEQ ID NO: 1776 - RNA, 21 nt, synthetic construct
  source 1..21: mol_type = other RNA
tgatgttgtaatatataggtt

SEQ ID NO: 1777 - RNA, 21 nt, synthetic construct
  source 1..21: mol_type = other RNA
tgaatcgctttcatttccttt

SEQ ID NO: 1778 - RNA, 21 nt, synthetic construct
  source 1..21: mol_type = other RNA
tatactcctttaattcatctt

SEQ ID NO: 1779 - RNA, 21 nt, synthetic construct
  source 1..21: mol_type = other RNA
taatagactttaaagcatatt

SEQ ID NO: 1780 - RNA, 21 nt, synthetic construct
  source 1..21: mol_type = other RNA
ttaaagaaatagactttaatt

SEQ ID NO: 1781 - RNA, 21 nt, synthetic construct
  source 1..21: mol_type = other RNA
taaactttaaagaaatagatt

SEQ ID NO: 1782 - RNA, 21 nt, synthetic construct
  source 1..21: mol_type = other RNA
taatgatggtatataacaatt

SEQ ID NO: 1783 - RNA, 21 nt, synthetic construct
  source 1..21: mol_type = other RNA
taatgcagaaatatattcatt

SEQ ID NO: 1784 - RNA, 21 nt, synthetic construct
  source 1..21: mol_type = other RNA
tagtgtttaaggatgattctt

SEQ ID NO: 1785 - RNA, 21 nt, synthetic construct
  source 1..21: mol_type = other RNA
tataaattcaagtgtttaatt

SEQ ID NO: 1786 - RNA, 21 nt, synthetic construct
  source 1..21: mol_type = other RNA
taatataaattcaagtgtttt

SEQ ID NO: 1787 - RNA, 21 nt, synthetic construct
  source 1..21: mol_type = other RNA
tatacaatataaattcaagtt

SEQ ID NO: 1788 - RNA, 21 nt, synthetic construct
  source 1..21: mol_type = other RNA
tcatatgctgcaccatccctt

SEQ ID NO: 1789 - RNA, 21 nt, synthetic construct
  source 1..21: mol_type = other RNA
tggaaattgcatatgctgctt

SEQ ID NO: 1790 - RNA, 21 nt, synthetic construct
  source 1..21: mol_type = other RNA
taagataatgcagtttctctt

SEQ ID NO: 1791 - RNA, 21 nt, synthetic construct
  source 1..21: mol_type = other RNA
taaattacatacttctccatt

SEQ ID NO: 1792 - RNA, 21 nt, synthetic construct
  source 1..21: mol_type = other RNA
tgcagtgttgcaaaggcagtt

SEQ ID NO: 1793 - RNA, 21 nt, synthetic construct
  source 1..21: mol_type = other RNA
taaactgcagtgttgcaaatt

SEQ ID NO: 1794 - RNA, 21 nt, synthetic construct
  source 1..21: mol_type = other RNA
tagagtcgatcatttctattt

SEQ ID NO: 1795 - RNA, 21 nt, synthetic construct
  source 1..21: mol_type = other RNA
ttagagtcgatcatttctatt

SEQ ID NO: 1796 - RNA, 21 nt, synthetic construct
  source 1..21: mol_type = other RNA
taatattgatagagtcgattt

SEQ ID NO: 1797 - RNA, 21 nt, synthetic construct
  source 1..21: mol_type = other RNA
tatacaatattgatagagttt

SEQ ID NO: 1798 - RNA, 21 nt, synthetic construct
  source 1..21: mol_type = other RNA
ttgcattgtttcagtcttttt

SEQ ID NO: 1799 - RNA, 21 nt, synthetic construct
  source 1..21: mol_type = other RNA
tataaatgcattgtttcagtt

SEQ ID NO: 1800 - RNA, 21 nt, synthetic construct
  source 1..21: mol_type = other RNA
tatataaatgcattgtttctt

SEQ ID NO: 1801 - RNA, 21 nt, synthetic construct
  source 1..21: mol_type = other RNA
ttatataaatgcattgttttt

SEQ ID NO: 1802 - RNA, 21 nt, synthetic construct
  source 1..21: mol_type = other RNA
tattgtatacatattatattt

SEQ ID NO: 1803 - RNA, 21 nt, synthetic construct
  source 1..21: mol_type = other RNA
taatattgtatacatattatt

SEQ ID NO: 1804 - RNA, 21 nt, synthetic construct
  source 1..21: mol_type = other RNA
taaacaatattgtatacattt

SEQ ID NO: 1805 - RNA, 21 nt, synthetic construct
  source 1..21: mol_type = other RNA
tgacacttatttacaaaactt

SEQ ID NO: 1806 - RNA, 21 nt, synthetic construct
  source 1..21: mol_type = other RNA
tgagacacttatttacaaatt

SEQ ID NO: 1807 - RNA, 21 nt, synthetic construct
  source 1..21: mol_type = other RNA
tggagacacttatttacaatt

SEQ ID NO: 1808 - RNA, 21 nt, synthetic construct
  source 1..21: mol_type = other RNA
taggagacacttatttacatt

SEQ ID NO: 1809 - RNA, 21 nt, synthetic construct
  source 1..21: mol_type = other RNA
taaatgtccttagtgtaaatt

SEQ ID NO: 1810 - RNA, 21 nt, synthetic construct
  source 1..21: mol_type = other RNA
ttgaaatgtccttagtgtatt

SEQ ID NO: 1811 - RNA, 21 nt, synthetic construct
  source 1..21: mol_type = other RNA
tcttaatttgaaatgtccttt

SEQ ID NO: 1812 - RNA, 21 nt, synthetic construct
  source 1..21: mol_type = other RNA
tcactatttaatctgctaatt

SEQ ID NO: 1813 - RNA, 21 nt, synthetic construct
  source 1..21: mol_type = other RNA
tccactatttaatctgctatt

SEQ ID NO: 1814 - RNA, 21 nt, synthetic construct
  source 1..21: mol_type = other RNA
taccactatttaatctgcttt

SEQ ID NO: 1815 - RNA, 21 nt, synthetic construct
  source 1..21: mol_type = other RNA
taccatctaatcattaacatt

SEQ ID NO: 1816 - RNA, 21 nt, synthetic construct
  source 1..21: mol_type = other RNA
ttgtaatataaccatctaatt

SEQ ID NO: 1817 - RNA, 21 nt, synthetic construct
  source 1..21: mol_type = other RNA
tatgattgtaatataaccatt

SEQ ID NO: 1818 - RNA, 21 nt, synthetic construct
  source 1..21: mol_type = other RNA
tgaatgttaatcatgtaaatt

SEQ ID NO: 1819 - RNA, 21 nt, synthetic construct
  source 1..21: mol_type = other RNA
ttgaatgttaatcatgtaatt

SEQ ID NO: 1820 - RNA, 21 nt, synthetic construct
  source 1..21: mol_type = other RNA
taaattcactttatacagctt

SEQ ID NO: 1821 - RNA, 21 nt, synthetic construct
  source 1..21: mol_type = other RNA
taaaccattgaaatttcaatt

SEQ ID NO: 1822 - RNA, 21 nt, synthetic construct
  source 1..21: mol_type = other RNA
tgtaaaccattgaaatttctt

SEQ ID NO: 1823 - RNA, 21 nt, synthetic construct
  source 1..21: mol_type = other RNA
tgagatttaaacacaatgatt

SEQ ID NO: 1824 - RNA, 21 nt, synthetic construct
  source 1..21: mol_type = other RNA
taacgttgagatttaaacatt

SEQ ID NO: 1825 - RNA, 21 nt, synthetic construct
  source 1..21: mol_type = other RNA
tggaacgttgagatttaaatt

SEQ ID NO: 1826 - RNA, 21 nt, synthetic construct
  source 1..21: mol_type = other RNA
tgagatagcatcagtttattt

SEQ ID NO: 1827 - RNA, 21 nt, synthetic construct
  source 1..21: mol_type = other RNA
taacagttattgttgagattt

SEQ ID NO: 1828 - RNA, 21 nt, synthetic construct
  source 1..21: mol_type = other RNA
ttaacagttattgttgagatt

SEQ ID NO: 1829 - RNA, 21 nt, synthetic construct
  source 1..21: mol_type = other RNA
tttcattatcaaattataatt

SEQ ID NO: 1830 - RNA, 21 nt, synthetic construct
  source 1..21: mol_type = other RNA
tgaaatatattcattatcatt

SEQ ID NO: 1831 - RNA, 21 nt, synthetic construct
  source 1..21: mol_type = other RNA
tagaaatatattcattatctt

SEQ ID NO: 1832 - RNA, 21 nt, synthetic construct
  source 1..21: mol_type = other RNA
ttgcagaaatatattcatttt

SEQ ID NO: 1833 - RNA, 21 nt, synthetic construct
  source 1..21: mol_type = other RNA
tagtaaataaatgcagaaatt

SEQ ID NO: 1834 - RNA, 21 nt, synthetic construct
  source 1..21: mol_type = other RNA
tcagaagtaaataaatgcatt

SEQ ID NO: 1835 - RNA, 21 nt, synthetic construct
  source 1..21: mol_type = other RNA
tcaataaatttgattaacatt

SEQ ID NO: 1836 - RNA, 21 nt, synthetic construct
  source 1..21: mol_type = other RNA
tataatttcatttagtcattt

SEQ ID NO: 1837 - RNA, 21 nt, synthetic construct
  source 1..21: mol_type = other RNA
taataatttcatttagtcatt

SEQ ID NO: 1838 - RNA, 21 nt, synthetic construct
  source 1..21: mol_type = other RNA
tcaaattagatgtaagaaatt

SEQ ID NO: 1839 - RNA, 21 nt, synthetic construct
  source 1..21: mol_type = other RNA
tctacaaattagatgtaagtt

SEQ ID NO: 1840 - RNA, 21 nt, synthetic construct
  source 1..21: mol_type = other RNA
tcttatactgtttctacaatt

SEQ ID NO: 1841 - RNA, 21 nt, synthetic construct
  source 1..21: mol_type = other RNA
taacttatactgtttctactt

SEQ ID NO: 1842 - RNA, 21 nt, synthetic construct
  source 1..21: mol_type = other RNA
ttataacttatactgtttctt

SEQ ID NO: 1843 - RNA, 16 nt, synthetic construct
  source 1..16: mol_type = other RNA
taatgcatgtacttga

SEQ ID NO: 1844 - RNA, 16 nt, synthetic construct
  source 1..16: mol_type = other RNA
gaatagaagccattaa

SEQ ID NO: 1845 - RNA, 16 nt, synthetic construct
  source 1..16: mol_type = other RNA
ttaagatacaaatcca

SEQ ID NO: 1846 - RNA, 16 nt, synthetic construct
  source 1..16: mol_type = other RNA
tcagcaaagatgttaa

SEQ ID NO: 1847 - RNA, 16 nt, synthetic construct
  source 1..16: mol_type = other RNA
gcttctttaaatttaa

SEQ ID NO: 1848 - RNA, 16 nt, synthetic construct
  source 1..16: mol_type = other RNA
aaaggcccaactatga

SEQ ID NO: 1849 - RNA, 16 nt, synthetic construct
  source 1..16: mol_type = other RNA
actcctacaacagtga

SEQ ID NO: 1850 - RNA, 16 nt, synthetic construct
  source 1..16: mol_type = other RNA
ctacaacagtgtttga

SEQ ID NO: 1851 - RNA, 16 nt, synthetic construct
  source 1..16: mol_type = other RNA
tgaagacagtgttgca

SEQ ID NO: 1852 - RNA, 16 nt, synthetic construct
  source 1..16: mol_type = other RNA
cagaatcacgatgcta

SEQ ID NO: 1853 - RNA, 16 nt, synthetic construct
  source 1..16: mol_type = other RNA
atgggattggattata

SEQ ID NO: 1854 - RNA, 16 nt, synthetic construct
  source 1..16: mol_type = other RNA
gattggattatcgcta

SEQ ID NO: 1855 - RNA, 16 nt, synthetic construct
  source 1..16: mol_type = other RNA
gctctggagagtgtga

SEQ ID NO: 1856 - RNA, 16 nt, synthetic construct
  source 1..16: mol_type = other RNA
gagagtgtgaatttga

SEQ ID NO: 1857 - RNA, 16 nt, synthetic construct
  source 1..16: mol_type = other RNA
agagtgtgaatttgta

SEQ ID NO: 1858 - RNA, 16 nt, synthetic construct
  source 1..16: mol_type = other RNA
ccaattaatatgctaa

SEQ ID NO: 1859 - RNA, 16 nt, synthetic construct
  source 1..16: mol_type = other RNA
caattaatatgctata

SEQ ID NO: 1860 - RNA, 16 nt, synthetic construct
  source 1..16: mol_type = other RNA
ttaatatgctatatta

SEQ ID NO: 1861 - RNA, 16 nt, synthetic construct
  source 1..16: mol_type = other RNA
gcaaagaacaaataaa

SEQ ID NO: 1862 - RNA, 16 nt, synthetic construct
  source 1..16: mol_type = other RNA
caaagaacaaataata

SEQ ID NO: 1863 - RNA, 15 nt, synthetic construct
  source 1..15: mol_type = other RNA
aagaacaaataataa

SEQ ID NO: 1864 - RNA, 16 nt, synthetic construct
  source 1..16: mol_type = other RNA
cataagctacagtata

SEQ ID NO: 1865 - RNA, 16 nt, synthetic construct
  source 1..16: mol_type = other RNA
atatatgcaatggtta

SEQ ID NO: 1866 - RNA, 16 nt, synthetic construct
  source 1..16: mol_type = other RNA
tgatttccagagttta

SEQ ID NO: 1867 - RNA, 16 nt, synthetic construct
  source 1..16: mol_type = other RNA
agctagaaggagatca

SEQ ID NO: 1868 - RNA, 16 nt, synthetic construct
  source 1..16: mol_type = other RNA
gctagaaggagatcaa

SEQ ID NO: 1869 - RNA, 16 nt, synthetic construct
  source 1..16: mol_type = other RNA
tcaaattacatttata

SEQ ID NO: 1870 - RNA, 16 nt, synthetic construct
  source 1..16: mol_type = other RNA
aattacatttatgtta

SEQ ID NO: 1871 - RNA, 16 nt, synthetic construct
  source 1..16: mol_type = other RNA
ttacatttatgttcca

SEQ ID NO: 1872 - RNA, 16 nt, synthetic construct
  source 1..16: mol_type = other RNA
acatttatgttcctaa

SEQ ID NO: 1873 - RNA, 16 nt, synthetic construct
  source 1..16: mol_type = other RNA
atatattacaacatca

SEQ ID NO: 1874 - RNA, 16 nt, synthetic construct
  source 1..16: mol_type = other RNA
aaatgaaagcgattca

SEQ ID NO: 1875 - RNA, 16 nt, synthetic construct
  source 1..16: mol_type = other RNA
gaattaaaggagtata

SEQ ID NO: 1876 - RNA, 16 nt, synthetic construct
  source 1..16: mol_type = other RNA
gctttaaagtctatta

SEQ ID NO: 1877 - RNA, 16 nt, synthetic construct
  source 1..16: mol_type = other RNA
aagtctatttctttaa

SEQ ID NO: 1878 - RNA, 16 nt, synthetic construct
  source 1..16: mol_type = other RNA
atttctttaaagttta

SEQ ID NO: 1879 - RNA, 16 nt, synthetic construct
  source 1..16: mol_type = other RNA
ttatataccatcatta

SEQ ID NO: 1880 - RNA, 16 nt, synthetic construct
  source 1..16: mol_type = other RNA
atatatttctgcatta

SEQ ID NO: 1881 - RNA, 16 nt, synthetic construct
  source 1..16: mol_type = other RNA
tcatccttaaacacta

SEQ ID NO: 1882 - RNA, 16 nt, synthetic construct
  source 1..16: mol_type = other RNA
aacacttgaatttata

SEQ ID NO: 1883 - RNA, 16 nt, synthetic construct
  source 1..16: mol_type = other RNA
acttgaatttatatta

SEQ ID NO: 1884 - RNA, 16 nt, synthetic construct
  source 1..16: mol_type = other RNA
gaatttatattgtata

SEQ ID NO: 1885 - RNA, 16 nt, synthetic construct
  source 1..16: mol_type = other RNA
atggtgcagcatatga

SEQ ID NO: 1886 - RNA, 16 nt, synthetic construct
  source 1..16: mol_type = other RNA
gcatatgcaatttcca

SEQ ID NO: 1887 - RNA, 16 nt, synthetic construct
  source 1..16: mol_type = other RNA
aaactgcattatctta

SEQ ID NO: 1888 - RNA, 16 nt, synthetic construct
  source 1..16: mol_type = other RNA
agaagtatgtaattta

SEQ ID NO: 1889 - RNA, 16 nt, synthetic construct
  source 1..16: mol_type = other RNA
cctttgcaacactgca

SEQ ID NO: 1890 - RNA, 16 nt, synthetic construct
  source 1..16: mol_type = other RNA
gcaacactgcagttta

SEQ ID NO: 1891 - RNA, 16 nt, synthetic construct
  source 1..16: mol_type = other RNA
gaaatgatcgactcta

SEQ ID NO: 1892 - RNA, 16 nt, synthetic construct
  source 1..16: mol_type = other RNA
aaatgatcgactctaa

SEQ ID NO: 1893 - RNA, 16 nt, synthetic construct
  source 1..16: mol_type = other RNA
gactctatcaatatta

SEQ ID NO: 1894 - RNA, 16 nt, synthetic construct
  source 1..16: mol_type = other RNA
ctatcaatattgtata

SEQ ID NO: 1895 - RNA, 16 nt, synthetic construct
  source 1..16: mol_type = other RNA
gactgaaacaatgcaa

SEQ ID NO: 1896 - RNA, 16 nt, synthetic construct
  source 1..16: mol_type = other RNA
aaacaatgcatttata

SEQ ID NO: 1897 - RNA, 16 nt, synthetic construct
  source 1..16: mol_type = other RNA
acaatgcatttatata

SEQ ID NO: 1898 - RNA, 16 nt, synthetic construct
  source 1..16: mol_type = other RNA
caatgcatttatataa

SEQ ID NO: 1899 - RNA, 16 nt, synthetic construct
  source 1..16: mol_type = other RNA
taatatgtatacaata

SEQ ID NO: 1900 - RNA, 16 nt, synthetic construct
  source 1..16: mol_type = other RNA
tatgtatacaatatta

SEQ ID NO: 1901 - RNA, 16 nt, synthetic construct
  source 1..16: mol_type = other RNA
tatacaatattgttta

SEQ ID NO: 1902 - RNA, 16 nt, synthetic construct
  source 1..16: mol_type = other RNA
ttgtaaataagtgtca

SEQ ID NO: 1903 - RNA, 16 nt, synthetic construct
  source 1..16: mol_type = other RNA
gtaaataagtgtctca

SEQ ID NO: 1904 - RNA, 16 nt, synthetic construct
  source 1..16: mol_type = other RNA
taaataagtgtctcca

SEQ ID NO: 1905 - RNA, 16 nt, synthetic construct
  source 1..16: mol_type = other RNA
aaataagtgtctccta

SEQ ID NO: 1906 - RNA, 16 nt, synthetic construct
  source 1..16: mol_type = other RNA
acactaaggacattta

SEQ ID NO: 1907 - RNA, 16 nt, synthetic construct
  source 1..16: mol_type = other RNA
actaaggacatttcaa

SEQ ID NO: 1908 - RNA, 16 nt, synthetic construct
  source 1..16: mol_type = other RNA
acatttcaaattaaga

SEQ ID NO: 1909 - RNA, 16 nt, synthetic construct
  source 1..16: mol_type = other RNA
gcagattaaatagtga

SEQ ID NO: 1910 - RNA, 16 nt, synthetic construct
  source 1..16: mol_type = other RNA
cagattaaatagtgga

SEQ ID NO: 1911 - RNA, 16 nt, synthetic construct
  source 1..16: mol_type = other RNA
agattaaatagtggta

SEQ ID NO: 1912 - RNA, 16 nt, synthetic construct
  source 1..16: mol_type = other RNA
taatgattagatggta

SEQ ID NO: 1913 - RNA, 16 nt, synthetic construct
  source 1..16: mol_type = other RNA
gatggttatattacaa

SEQ ID NO: 1914 - RNA, 16 nt, synthetic construct
  source 1..16: mol_type = other RNA
ttatattacaatcata

SEQ ID NO: 1915 - RNA, 16 nt, synthetic construct
  source 1..16: mol_type = other RNA
acatgattaacattca

SEQ ID NO: 1916 - RNA, 16 nt, synthetic construct
  source 1..16: mol_type = other RNA
catgattaacattcaa

SEQ ID NO: 1917 - RNA, 16 nt, synthetic construct
  source 1..16: mol_type = other RNA
gtataaagtgaattta

SEQ ID NO: 1918 - RNA, 16 nt, synthetic construct
  source 1..16: mol_type = other RNA
aaatttcaatggttta

SEQ ID NO: 1919 - RNA, 16 nt, synthetic construct
  source 1..16: mol_type = other RNA
atttcaatggtttaca

SEQ ID NO: 1920 - RNA, 16 nt, synthetic construct
  source 1..16: mol_type = other RNA
ttgtgtttaaatctca

SEQ ID NO: 1921 - RNA, 16 nt, synthetic construct
  source 1..16: mol_type = other RNA
ttaaatctcaacgtta

SEQ ID NO: 1922 - RNA, 16 nt, synthetic construct
  source 1..16: mol_type = other RNA
aaatctcaacgttcca

SEQ ID NO: 1923 - RNA, 16 nt, synthetic construct
  source 1..16: mol_type = other RNA
aactgatgctatctca

SEQ ID NO: 1924 - RNA, 16 nt, synthetic construct
  source 1..16: mol_type = other RNA
tcaacaataactgtta

SEQ ID NO: 1925 - RNA, 16 nt, synthetic construct
  source 1..16: mol_type = other RNA
caacaataactgttaa

SEQ ID NO: 1926 - RNA, 16 nt, synthetic construct
  source 1..16: mol_type = other RNA
taatttgataatgaaa

SEQ ID NO: 1927 - RNA, 16 nt, synthetic construct
  source 1..16: mol_type = other RNA
taatgaatatatttca

SEQ ID NO: 1928 - RNA, 16 nt, synthetic construct
  source 1..16: mol_type = other RNA
aatgaatatatttcta

SEQ ID NO: 1929 - RNA, 16 nt, synthetic construct
  source 1..16: mol_type = other RNA
gaatatatttctgcaa

SEQ ID NO: 1930 - RNA, 16 nt, synthetic construct
  source 1..16: mol_type = other RNA
ctgcatttatttacta

SEQ ID NO: 1931 - RNA, 16 nt, synthetic construct
  source 1..16: mol_type = other RNA
atttatttacttctga

SEQ ID NO: 1932 - RNA, 16 nt, synthetic construct
  source 1..16: mol_type = other RNA
taatcaaatttattga

SEQ ID NO: 1933 - RNA, 16 nt, synthetic construct
  source 1..16: mol_type = other RNA
actaaatgaaattata

SEQ ID NO: 1934 - RNA, 16 nt, synthetic construct
  source 1..16: mol_type = other RNA
ctaaatgaaattatta

SEQ ID NO: 1935 - RNA, 16 nt, synthetic construct
  source 1..16: mol_type = other RNA
cttacatctaatttga

SEQ ID NO: 1936 - RNA, 16 nt, synthetic construct
  source 1..16: mol_type = other RNA
acatctaatttgtaga

SEQ ID NO: 1937 - RNA, 16 nt, synthetic construct
  source 1..16: mol_type = other RNA
tagaaacagtataaga

SEQ ID NO: 1938 - RNA, 16 nt, synthetic construct
  source 1..16: mol_type = other RNA
gaaacagtataagtta

SEQ ID NO: 1939 - RNA, 16 nt, synthetic construct
  source 1..16: mol_type = other RNA
acagtataagttataa

1. An isolated nucleic acid comprising a sense strand and an antisense strand, wherein the antisense strand comprises a sequence that is at least 80% complementary to at least 18 consecutive nucleotides of an activin receptor type 1 (ACVR1) R206H (ACVR1^{R206H}) sequence of SEQ ID NO: 675.

2. (canceled)

3. The isolated nucleic acid of claim 1, wherein:
the antisense strand is at least 80% complementary to a sequence as set forth in any one of SEQ ID NOs: 676-721;
the antisense strand comprises a nucleic acid sequence of any one of SEQ ID NOs: 768-813; and/or
the sense strand comprises a nucleic acid sequence of any one of SEQ ID NOs: 722-767.

4-14. (canceled)

15. The isolated nucleic acid of claim 1, wherein:
the sense strand comprises a chemical modification pattern set forth in Table 1 or 2;
the antisense strand comprises a chemical modification pattern set forth in Table 1 or 2;
the sense strand comprises a sequence set forth in any one of SEQ ID NOs: 1-16, and 33-62; and/or
the antisense strand comprises a sequence set forth in any one of SEQ ID NOs: 17-32 and 63-92.

16-18. (canceled)

19. An isolated nucleic acid comprising a sense strand and an antisense strand, wherein the antisense strand comprises a sequence that is at least 80% complementary to at least 18 consecutive nucleotides of an inhibitin beta A (INHBA) sequence of any one of SEQ ID NOs: 817-912.

20. (canceled)

21. The isolated nucleic acid of claim 19, wherein:
the antisense strand is at least 80% complementary to a sequence as set forth in any one of SEQ ID NOs: 913-1007;
the antisense strand comprises a nucleic acid sequence of any one of SEQ ID NOs: 1008-1103; and/or
the sense strand comprises a nucleic acid sequence of any one of SEQ ID NOs: 1104-1199.

22-32. (canceled)

33. The isolated nucleic acid of claim 19, wherein:
the sense strand comprises a chemical modification pattern set forth in Table 3;
the antisense strand comprises a chemical modification pattern set forth in Table 3;
the sense strand comprises a sequence set forth in any one of SEQ ID NOs: 93-188; and/or
the antisense strand comprises a sequence set forth in any one of SEQ ID NOs: 189-284.

34-36. (canceled)

37. An isolated nucleic acid comprising a sense strand and an antisense strand, wherein the antisense strand comprises a sequence that is at least 80% complementary to at least 18 consecutive nucleotides of a myostatin (MSTN) sequence of any one of SEQ ID NOs: 1376-1472 and 1200-1287.

38. (canceled)

39. The isolated nucleic acid of claim 37, wherein:
the antisense strand is at least 80% complementary to a sequence as set forth in any one of SEQ ID NOs: 1473-1569 and 1288-1375;
the antisense strand comprises a nucleic acid sequence of any one of SEQ ID NOs: 1570-1657 and 1746-1842; and/or
the sense strand comprises a nucleic acid sequence of any one of SEQ ID NOs: 1658-1745 and 1843-1939.

40-50. (canceled)

51. The isolated nucleic acid of claim 37, wherein:
the sense strand comprises a chemical modification pattern set forth in Table 4 or 5;
the antisense strand comprises a chemical modification pattern set forth in Table 4 or 5;
the sense strand comprises a sequence set forth in any one of SEQ ID NOs: 285-372 and 481-577; and/or
the antisense strand comprises a sequence set forth in any one of SEQ ID NOs: 373-480 and 578-674.

52-54. (canceled)

55. A bi-specific nucleic acid molecule comprising:
(i) a first siRNA targeting a first RNA transcript selected from activin receptor type 1 (ACVR1) R206H (ACVR1^{R206H}), INHBA, IL-1β, TNF, and myostatin (MSTN); linked to
(ii) a second siRNA targeting a second RNA transcript selected from ACVR1^{R206H}, INHBA, IL-1β, TNF, and myostatin (MSTN),
wherein the first RNA transcript and the second RNA transcript are not transcribed from a same gene.

56. (canceled)

57. The bi-specific nucleic acid molecule of claim 55, wherein:
the first siRNA is selected from an siRNA set forth in any one of Tables 1-5; and/or
the second siRNA is selected from an siRNA set forth in any one of Tables 1-5.

58-60. (canceled)

61. A composition comprising the isolated nucleic acid of claim 1 and a pharmaceutically acceptable excipient.

62. A method for inhibiting Activin A activity or function or treating or preventing heterotopic ossification (HO) or fibrodysplasia ossificans progressiva (FOP) in a subject in need thereof, the method comprising administering to the subject the isolated nucleic acid of claim 1.

63. A method for inhibiting Activin A activity or function or treating or preventing heterotopic ossification (HO) or fibrodysplasia ossificans progressiva (FOP) in a subject in need thereof, the method comprising administering to the subject the isolated nucleic acid of claim 19.

64. A method for inhibiting Activin A activity or function or treating or preventing heterotopic ossification (HO) or fibrodysplasia ossificans progressiva (FOP) in a subject in need thereof, the method comprising administering to the subject the isolated nucleic acid of claim 37.

65. (canceled)

66. The method of claim 62, wherein the subject is a human and comprises one or more mutations in an ACVR1 allele.

67. A composition comprising the isolated nucleic acid of claim 19 and a pharmaceutically acceptable excipient.

68. A composition comprising the isolated nucleic acid of claim 37 and a pharmaceutically acceptable excipient.

69. A composition comprising the bi-specific nucleic acid molecule of claim 55 and a pharmaceutically acceptable excipient.

70. A method for inhibiting Activin A activity or function or treating or preventing heterotopic ossification (HO) or fibrodysplasia ossificans progressiva (FOP) in a subject in need thereof, the method comprising administering to the subject the bi-specific nucleic acid molecule of claim 55.

71. The method of claim 70, wherein the subject is a human and comprises one or more mutations in an ACVR1 allele.

72. A method for inhibiting Activin A activity or function or treating or preventing heterotopic ossification (HO) or fibrodysplasia ossificans progressiva (FOP) in a subject in need thereof, the method comprising administering to the subject a composition comprising the isolated nucleic acid of claim 1 and a pharmaceutically acceptable excipient.

73. A method for inhibiting Activin A activity or function or treating or preventing heterotopic ossification (HO) or fibrodysplasia ossificans progressiva (FOP) in a subject in need thereof, the method comprising administering to the subject a composition comprising the isolated nucleic acid of claim 19 and a pharmaceutically acceptable excipient.

74. A method for inhibiting Activin A activity or function or treating or preventing heterotopic ossification (HO) or fibrodysplasia ossificans progressiva (FOP) in a subject in need thereof, the method comprising administering to the subject a composition comprising the isolated nucleic acid of claim 37 and a pharmaceutically acceptable excipient.

75. A method for inhibiting Activin A activity or function or treating or preventing heterotopic ossification (HO) or fibrodysplasia ossificans progressiva (FOP) in a subject in need thereof, the method comprising administering to the subject a composition comprising the bi-specific nucleic acid molecule of claim 55 and a pharmaceutically acceptable excipient.
